(19) United States
(12) Patent Application Publication
(10) Pub. No.: US 2023/0295639 A1
(43) Pub. Date: Sep. 21, 2023

(54) De novo designed NTF2-like scaffolds for de novo design of enzymes and small molecule binders

(71) Applicant: University of Washington, Seattle, WA (US)

(72) Inventors: Christoffer NORN, Seattle, WA (US); Ivan ANISHCHANKA, Seattle, WA (US); David BAKER, Seattle, WA (US); Sam PELLOCK, Seattle, WA (US); Douglas TISCHER, Seattle, WA (US); Hsien-Wei YEH, Seattle, WA (US)

(21) Appl. No.: 18/155,179

(22) Filed: Jan. 17, 2023

Related U.S. Application Data
(60) Provisional application No. 63/300,178, filed on Jan. 17, 2022.

(51) Int. Cl. C12N 15/62; C12N 15/63; C12N 15/10

(52) U.S. Cl. CPC C12N 15/62; C12N 15/1044; C12N 15/63

(57) ABSTRACT

Polypeptide are disclosed that comprise an amino acid sequence at least 35%, 40%, 45%, 50%, 55%, 60%, 65%, 70%, 75%, 80%, 85%, 90%, 91%, 92%, 93%, 94%, 95%, 96%, 97%, 98%, 99%, or 100% identical to the amino acid sequence selected from the group consisting of SEQ ID NO:1-1615, not including any functional domains added fused to the protein (whether N-terminal, C-terminal, or internal), and wherein the 1, 2, 3, 4, or 5 N-terminal and/or C-terminal amino acid residues may be present or absent when considering the percent identity.

### RELATED APPLICATIONS

[0001] This application claims priority to U.S. Provisional Application 63/300,178 filed Jan. 17, 2022, incorporated by reference herein in its entirety.

### FEDERAL FUNDING STATEMENT

[0002] This invention was made with government support under Grant No. BB/S017135/1, awarded by the National Science Foundation. The government has certain rights in the invention.

### REFERENCE TO AN ELECTRONIC SEQUENCE LISTING

[0003] A computer readable form of the Sequence Listing is filed with this application by electronic submission and is hereby incorporated by reference in its entirety. The Sequence Listing is contained in the XML file created on Jan. 11, 2023 having the name “21-1623-US.xml” and is 1,589,305 bytes in size

### BACKGROUND

[0004] Computational enzyme design generally starts from an ideal active site or theozyme, consisting of protein functional groups surrounding the reaction transition state that is then matched into a set of existing scaffolds - typically, native proteins. However, de novo enzyme design has been limited by a lack of suitable protein structures and the complexity of native protein sequence-structure relationships.

### SUMMARY

[0005] In one aspect, the disclosure provides polypeptides comprising an amino acid sequence at least 35%, 40%, 45%, 50%, 55%, 60%, 65%, 70%, 75%, 80%, 85%, 90%, 91%, 92%, 93%, 94%, 95%, 96%, 97%, 98%, 99%, or 100% identical to the amino acid sequence selected from the group consisting of SEQ ID NO:1-1615, not including any functional domains added fused to the protein (whether N-terminal, C-terminal, or internal), and wherein the 1, 2, 3, 4, or 5 N-terminal and/or C-terminal amino acid residues may be present or absent when considering the percent identity. In one embodiment, the polypeptide comprises the secondary structure arrangement H1-L1-H2-L2-E1-L3-E2-L4-H3-L5-E3-L6-E4-L7-E5-L8-E6, wherein “H” is a helical domain, “L” is a loop domain, and “E” is a beta strand domain. In another embodiment, the disclosure provides fusion proteins comprising a polypeptide of the disclosure fused to one or more functional polypeptides.

[0006] In one embodiment, the disclosure provides nucleic acids encoding the protein or fusion protein of any embodiment disclosed herein. In another embodiment, the disclosure provides expression vectors comprising the nucleic acid of any embodiment operatively linked to a suitable control sequence. In a further embodiment, the disclosure provides host cells comprising the polypeptide, fusion protein, nucleic acid, and/or expression vector of any embodiment herein. In another embodiment, the disclosure provides libraries comprising 5, 10, 35, 50, 100, 250, 500, 750, 1000, or more different polypeptides, fusion proteins, nucleic acids, expression vectors, and/or host cells of any embodiment herein. In one embodiment, the disclosure provides methods for use of the polypeptides, fusion proteins, nucleic acids, expression vectors, host cells, and/or libraries of any embodiment herein, including but not limited to as specific protein and small molecule binders, and to identify specific protein and small molecule binders.

### DESCRIPTION OF FIGURE

[0007] FIG. 1A-FIG. 1G: Generation of idealized scaffolds and computational design of de novo luciferases. (FIG. 1A) Family-wide hallucination. Sequences encoding proteins with the desired topology are optimized by Monte Carlo sampling with a multicomponent loss function. Structurally conserved regions are evaluated based on consistency with input residue-residue distance and orientation distributions obtained from 85 experimental structures of NTF2-like proteins, while variable non-ideal regions are evaluated based on the confidence of predicted inter-residue geometries calculated as the KL-divergence between network predictions and the background distribution. The sequence-space MCMC-sampling incorporates both sequence changes and insertions/deletions (see Methods) to guide the hallucinated sequence towards encoding structures with the desired folds. Hydrogen-bonding networks are incorporated into the designed structures to increase structural specificity. (FIG. 1B-FIG. 1D) The design of luciferase active sites. (FIG. 1B) Generation of DTZ conformers using AIMNet. (FIG. 1C) Generation of a rotamer interaction field (RIF) to stabilize the anionic DTZ and form hydrophobic packing interactions around the DTZ conformers. (FIG. 1D) Docking of the RIF into the hallucinated scaffolds, and optimization of substrate-scaffold interactions using position-specific score matrices (PSSM)-biased sequence design. (FIG. 1E) Selection of the NTF2 topology. The RIF was docked into 4000 native small molecule binding proteins, excluding proteins that bind the luciferin substrate using more than 5 loop residues. Most of the top hits were from the NTF2-like protein superfamily. Using the family-wide hallucination scaffold generation protocol, we generated 1615 scaffolds and found that these yielded better predicted RIF binding energies than the native proteins. (FIG. 1F) Scaffolds generated with family-wide hallucination sample more within the space of the native structures than previous blueprint generated scaffolds, and (FIG. 1G) have stronger sequence to structure relationships than native or blueprint de novo NTF2 scaffolds.

### DETAILED DESCRIPTION

[0008] All references cited are herein incorporated by reference in their entirety. Within this application, unless otherwise stated, the techniques utilized may be found in any of several well-known references such as: Molecular Cloning: A Laboratory Manual (Sambrook, et al., 1989, Cold Spring Harbor Laboratory Press), Gene Expression Technology (Methods in Enzymology, Vol. 185, edited by D. Goeddel, 1991. Academic Press, San Diego, CA), “Guide to Protein Purification” in Methods in Enzymology (M.P. Deutshcer, ed., (1990) Academic Press, Inc.); PCR Protocols: A Guide to Methods and Applications (Innis, et al. 1990. Academic Press, San Diego, CA), Culture of Animal Cells: A Manual of Basic Technique, 2nd Ed. (R.I. Freshney. 1987. Liss, Inc. New York, NY), Gene Transfer and Expression Protocols, pp. 109-128, ed. E.J. Murray, The Humana Press Inc., Clifton, N.J.), and the Ambion 1998 Catalog (Ambion, Austin, TX).

[0009] As used herein, the singular forms “a”, “an” and “the” include plural referents unless the context clearly dictates otherwise.

[0010] As used herein, the amino acid residues are abbreviated as follows: alanine (Ala; A), asparagine (Asn; N), aspartic acid (Asp; D), arginine (Arg; R), cysteine (Cys; C), glutamic acid (Glu; E), glutamine (Gln; Q), glycine (Gly; G), histidine (His; H), isoleucine (Ile; I), leucine (Leu; L), lysine (Lys; K), methionine (Met; M), phenylalanine (Phe; F), proline (Pro; P), serine (Ser; S), threonine (Thr; T), tryptophan (Trp; W), tyrosine (Tyr; Y), and valine (Val; V).

[0011] In all embodiments of polypeptides disclosed herein, any N-terminal methionine residues are optional (i.e.: the N-terminal methionine residue may be present or may be absent).

[0012] All embodiments of any aspect of the disclosure can be used in combination, unless the context clearly dictates otherwise.

[0013] Unless the context clearly requires otherwise, throughout the description and the claims, the words ‘comprise’, ‘comprising’, and the like are to be construed in an inclusive sense as opposed to an exclusive or exhaustive sense; that is to say, in the sense of “including, but not limited to”. Words using the singular or plural number also include the plural and singular number, respectively. Additionally, the words “herein,” “above,” and “below” and words of similar import, when used in this application, shall refer to this application as a whole and not to any particular portions of the application.

[0014] In one aspect, the disclosure provides a non-naturally occurring polypeptide comprising an amino acid sequence at least 35%, 40%, 45%, 50%, 55%, 60%, 65%, 70%, 75%, 80%, 85%, 90%, 91%, 92%, 93%, 94%, 95%, 96%, 97%, 98%, 99%, or 100% identical to the amino acid sequence selected from the group consisting of SEQ ID NO:1-1615, not including any functional domains added fused to the protein (whether N-terminal, C-terminal, or internal), and wherein the 1, 2, 3, 4, or 5 N-terminal and/or C-terminal amino acid residues may be present or absent when considering the percent identity. The amino acid sequence of SEQ ID NO:1-1615 are shown in Table 1.

[0015] As disclosed in detail in the examples, the inventors designed the polypeptides of SEQ ID NO:1-1615, which serve as scaffolds with pockets of the appropriate size and shape for binding to a target of interest (exemplified in the examples by diphenylterazine (DTZ)). The scaffolds are based on the NTF2-like superfamily as a target topology. The inventors implemented a steered hallucination method to generate idealized structures (FIG. 1A). As seeds for diversification and functionalization, trRosetta was used to generate a diverse set of structural models for 2k naturally occurring NTF2s and used them as seeds. Starting from each native seed structure, steered hallucination of structurally conserved regions was conducted by minimizing an empirical topology-specific loss function over residue pair geometries, while structurally diverse regions (long flexible loops, etc.) were modified both in length and sequence to maximize the confidence of neural network predictions. To further encode structural specificity of the backbone as well as of the binding pocket side chains, the inventors identified buried long-range hydrogen bonding networks in native structures and incorporated these into the idealized scaffolds while designing the sequence constrained by sequence bias of the fold family.

[0016] The polypeptides can be used, for example, as specific protein and small molecule binders, and libraries of the polypeptides can be used, for example, to identify specific protein and small molecule binders.

[0017] Any N-terminal methionine residues are optional and may be present or absent in the polypeptide and when determining percent identity.

[0018] In one embodiment, the percent identity relative to the reference sequence is carried out by sequence alignment with the Needleman-Wunsch algorithm, a common sequence alignment tool for those of skill in the art, which allows for insertions and deletions. In another embodiment, 1, 2, 3, 4, or 5 N-terminal and/or C-terminal amino acid residues are absent and are not included when determining the percent identity relative to the reference amino acid sequence. In another embodiment, all residues in the reference amino acid sequence are included when determining the percent identity relative to the reference amino acid sequence.

[0019] In one embodiment, amino acid substitutions relative to the reference amino acid sequence are conservative amino acid substitutions. As used herein, “conservative amino acid substitution” means a given amino acid can be replaced by a residue having similar physiochemical characteristics, e.g., substituting one aliphatic residue for another (such as Ile, Val, Leu, or Ala for one another), or substitution of one polar residue for another (such as between Lys and Arg; Glu and Asp; or Gln and Asn). Other such conservative substitutions, e.g., substitutions of entire regions having similar hydrophobicity characteristics, are known. Proteins comprising conservative amino acid substitutions can be tested in any one of the assays described herein to confirm that a desired activity, is retained. Amino acids can be grouped according to similarities in the properties of their side chains (in A. L. Lehninger, in Biochemistry, second ed., pp. 73-75, Worth Publishers, New York (1975)): (1) non-polar: Ala (A), Val (V), Leu (L), Ile (I), Pro (P), Phe (F), Trp (W), Met (M); (2) uncharged polar: Gly (G), Ser (S), Thr (T), Cys (C), Tyr (Y), Asn (N), Gln (Q); (3) acidic: Asp (D), Glu (E); (4) basic: Lys (K), Arg (R), His (H). Alternatively, naturally occurring residues can be divided into groups based on common side-chain properties: (1) hydrophobic: Norleucine, Met, Ala, Val, Leu, Ile; (2) neutral hydrophilic: Cys, Ser, Thr, Asn, Gln; (3) acidic: Asp, Glu; (4) basic: His, Lys, Arg; (5) residues that influence chain orientation: Gly, Pro; (6) aromatic: Trp, Tyr, Phe. Non-conservative substitutions will entail exchanging a member of one of these classes for another class. Particular conservative substitutions include, for example; Ala into Gly or into Ser; Arg into Lys; Asn into Gln or into H is; Asp into Glu; Cys into Ser; Gln into Asn; Glu into Asp; Gly into Ala or into Pro; His into Asn or into Gln; Ile into Leu or into Val; Leu into Ile or into Val; Lys into Arg, into Gln or into Glu; Met into Leu, into Tyr or into Ile; Phe into Met, into Leu or into Tyr; Ser into Thr; Thr into Ser; Trp into Tyr; Tyr into Trp; and/or Phe into Val, into Ile or into Leu.

[0020] In another embodiment, the polypeptide comprises the secondary structure arrangement H1-L1-H2-L2-E1-L3-E2-L4-H3-L5-E3-L6-E4-L7-E5-L8-E6, wherein “H” is a helical domain, “L” is a loop domain, and “E” is a beta strand domain. In some embodiments, domain H1 is 19 amino acids in length, domain H2 is 7 amino acids in length, domain H3 is 14 amino acids in length, domain E1 is 4 amino acids in length, domain E2 is 4 amino acids in length, domain E3 is 10 amino acids in length, domain E4 is 12 amino acids in length, domain E5 is 14 amino acids in length, and domain E6 is 13 amino acids in length.

[0021] The loop domains may be of any length and may include insertions, relative to the amino acid sequence of SEQ ID NO:1-1615, of any residues or functional domains as deemed appropriate, including but not limited to metal binding domains, drug binding domains, GPCR receptors, protein switches, and small molecule binding domains.

[0022] Thus, in one embodiment, the disclosure provides fusion proteins comprising the polypeptide of any embodiment herein fused to one or more functional polypeptides. Any suitable functional polypeptide may be used, including but not limited to a therapeutic polypeptide, diagnostic polypeptide, targeting polypeptide, scaffold polypeptide, or polypeptide that confers stability on the fusion protein. In one embodiment, the one or more functional polypeptides are fused to the N-terminus and/or C-terminus of the protein. In another embodiment, the one or more functional polypeptides include ones inserted internally into the polypeptide of any one of SEQ ID NO:1-1615. In a further embodiment, the fusion protein comprises the secondary structure arrangement H1-L1-H2-L2-E1-L3-E2-L4-H3-L5-E3-L6-E4-L7-E5-L8-E6, wherein “H” is a helical domain, “L” is a loop domain, and “E” is a beta strand domain, and wherein one or more functional polypeptide is inserted into a loop domain.

[0023] In another aspect the disclosure provides nucleic acids encoding the polypeptide or fusion protein of any embodiment or combination of embodiments of the disclosure. The nucleic acid sequence may comprise single stranded or double stranded RNA (such as an mRNA) or DNA in genomic or cDNA form, or DNA-RNA hybrids, each of which may include chemically or biochemically modified, non-natural, or derivatized nucleotide bases. Such nucleic acid sequences may comprise additional sequences useful for promoting expression and/or purification of the encoded polypeptide, including but not limited to polyA sequences, modified Kozak sequences, and sequences encoding epitope tags, export signals, and secretory signals, nuclear localization signals, and plasma membrane localization signals. It will be apparent to those of skill in the art, based on the teachings herein, what nucleic acid sequences will encode the polypeptides of the disclosure.

[0024] In a further aspect, the disclosure provides expression vectors comprising the nucleic acid of any aspect of the disclosure operatively linked to a suitable control sequence. “Expression vector” includes vectors that operatively link a nucleic acid coding region or gene to any control sequences capable of effecting expression of the gene product. “Control sequences” operably linked to the nucleic acid sequences of the disclosure are nucleic acid sequences capable of effecting the expression of the nucleic acid molecules. The control sequences need not be contiguous with the nucleic acid sequences, so long as they function to direct the expression thereof. Thus, for example, intervening untranslated yet transcribed sequences can be present between a promoter sequence and the nucleic acid sequences and the promoter sequence can still be considered “operably linked” to the coding sequence. Other such control sequences include, but are not limited to, polyadenylation signals, termination signals, and ribosome binding sites. Such expression vectors can be of any type, including but not limited plasmid and viral-based expression vectors. The control sequence used to drive expression of the disclosed nucleic acid sequences in a mammalian system may be constitutive (driven by any of a variety of promoters, including but not limited to, CMV, SV40, RSV, actin, EF) or inducible (driven by any of a number of inducible promoters including, but not limited to, tetracycline, ecdysone, steroid-responsive). The expression vector must be replicable in the host organisms either as an episome or by integration into host chromosomal DNA. In various embodiments, the expression vector may comprise a plasmid, viral-based vector, or any other suitable expression vector.

[0025] In another aspect, the disclosure provides host cells that comprise the nucleic acids, expression vectors (i.e., episomal or chromosomally integrated), non-naturally occurring polypeptides, or fusion proteins disclosed herein, wherein the host cells can be either prokaryotic or eukaryotic. The cells can be transiently or stably engineered to incorporate the nucleic acids or expression vector of the disclosure, using techniques including but not limited to bacterial transformations, calcium phosphate co-precipitation, electroporation, or liposome mediated-, DEAE dextran mediated-, polycationic mediated-, or viral mediated transfection.

[0026] In another embodiment, the disclosure provides libraries comprising 5, 10, 35, 50, 100, 250, 500, 750, 1000, or more different polypeptides, fusion proteins, nucleic acids, expression vectors, and/or host cells according to any embodiment or combination of embodiments herein. Such libraries can be used, for example, to identify specific protein and small molecule binders.

[0027] The disclosure further comprises methods for use of the polypeptide, fusion protein, nucleic acid, expression vector, host, and/or library of embodiment herein for any suitable use as disclosed herein, including but not limited to identifying or designing enzymes or small molecule binders.

[0028] In another aspect, the disclosure provides methods for de novo enzyme design, comprising methods according to any steps or combination of steps as described herein.

### EXAMPLES

### Summary

[0029] De novo enzyme design has sought to introduce active sites and substrate binding pockets predicted to catalyze a reaction of interest into geometrically compatible native scaffolds, but has been limited by a lack of suitable protein structures and the complexity of native protein sequence-structure relationships. Here we describe a deep-learning based “family-wide hallucination” approach that generates large numbers of idealized protein structures containing diverse pocket shapes and designed sequences that encode them. The design of highly active and specific biocatalysts from scratch with broad applications in biomedicine is an important milestone for computational enzyme design, and our approach should enable the design of a wide range of new and useful luciferases and other enzymes.

### Study

[0030] Bioluminescent light produced by the enzymatic oxidation of a luciferin substrate is widely used for bioassays and imaging in biomedical research. Because no excitation light source is needed, luminescent photons are produced in the dark which results in higher sensitivity than fluorescence imaging in live animal models and in biological samples where autofluorescence or phototoxicity is a concern^{4,5}. However, the development of luciferases as molecular probes has lagged behind that of well-developed fluorescent protein toolkits for a number of reasons: (i) very few native luciferases have been identified; (ii) many of those that have been identified require multiple disulfide bonds to stabilize the structure and are therefore prone to misfolding in mammalian cells; (iii) most native luciferases do not recognize synthetic luciferins with more desirable photophysical properties; and (iv) multiplexed imaging to follow multiple processes in parallel using mutually orthogonal luciferase-luciferin pairs has been limited by the low substrate specificity of native luciferases.

[0031] We sought to use de novo protein design to create new luciferases that are small, highly stable, well-expressed in cells, specific for one substrate, and need no cofactors to function. As we are not constrained to natural luciferase substrates, we chose a synthetic luciferin, Diphenylterazine (DTZ) as the target substrate duo to its good quantum yield, red-shifted emission³, favorable in vivo pharmacokinetics^{14,15}, and lack of required cofactors for emission. Previous computational enzyme design studies have primarily repurposed native protein scaffolds in the PDB, but there are few native structures with binding pockets appropriate for DTZ, and the effects of sequence changes on native proteins can be unpredictable. To circumvent these limitations, we set out to generate large numbers of ideal protein scaffolds with pockets of the appropriate size and shape for DTZ, and with clear sequence-structure relationships to facilitate subsequent active site incorporation. To identify protein folds capable of hosting such pockets, we first docked DTZ into 4000 native small molecule binding proteins. We found that many NTF2 (nuclear transport factor 2)-like folds have binding pockets with appropriate shape-complementary and size for DTZ placement (FIG. 1e), and hence selected the NTF2-like superfamily as the target topology.

### Family-Wide Hallucination

[0032] Native NTF2 structures have a range of pocket sizes and shapes but also contain non-ideal features such as long loops which compromise stability. To create large numbers of ideal NTF2-like structures, we developed a deep-learning based “family-wide hallucination” approach that integrates unconstrained de novo design^{19,20} and fixed backbone sequence design approaches²¹ to enable the generation of an essentially unlimited number of proteins having a desired fold (FIG. 1a). The family-wide hallucination approach utilizes the de novo sequence and structure discovery capability of unconstrained protein hallucination^{19,20} for loop and variable regions, and structure-guided sequence optimization for core regions. We employed the trRosetta™ structure prediction neural network²², which is effective in identifying experimentally successful de novo designed proteins and hallucinating new globular proteins of diverse topologies. Starting from sequences and predicted structures of 2,000 naturally occurring NTF2s, we used trRosetta™ to optimize the amino sequence of conserved core and variable loop regions. Protein core idealization was carried out with a topology-specific loss function over core residue pair geometries (see Methods) and variable loop optimization, by optimizing sequence length and identity to maximize the confidence of the neural network in the predicted structure. To further encode structural specificity, we incorporated buried, long-range hydrogen-bonding networks. The resulting 1615 family-wide hallucinated NTF2 scaffolds (SEQ ID NO:1-1615) provided more shape complementary binding pockets for DTZ than native small-molecule protein binding proteins (FIG. 1e). This approach samples protein backbones closer to native NTF2-like proteins (FIG. 1f) and with better scaffold quality metrics than a previous non deep-learning approach²³ (FIG. 1g).

### De Novo Design of Luciferases for DTZ

[0033] Standard computational enzyme design generally starts from an ideal active site or theozyme consisting of protein functional groups surrounding the reaction transition state that is then extrapolated into a set of existing scaffolds^{1,2}. However, the detailed mechanism of native marine luciferases is not well defined as only a handful of apo-structures and no holo-structures have been solved^{24,25} (excluding calcium-regulated photoproteins). Both quantum chemistry calculations^{26,27} and experimental data^{28,29} suggest that the chemiluminescent reaction proceeds through an anionic species and that the polarity of the surroundings can substantially alter the free energy of the subsequent single electron transfer (SET) process with triplet molecular oxygen (³O₂). Guided by these data, we sought to design a shape complementary catalytic site that stabilizes the anionic state of DTZ and lowers the SET energy barrier, assuming that the downstream dioxetane light emitter thermolysis steps are spontaneous. To stabilize the anionic species of DTZ, we focused on the placement of the positively charged guanidinium group of an arginine residue to interact with the anionic imidazopyrazinone core.

[0034] To computationally design such active sites into large numbers of hallucinated NTF2 scaffolds, we first used AIMNet³⁰ to generate an ensemble of anionic DTZ conformers (FIG. 1b). Next, around each conformer, we used the RIFgen method^{31,32} to enumerate Rotamer Interaction Fields (RIFs) on 3D grids consisting of millions of placements of amino acid sidechains making hydrogen bonding and nonpolar interactions with DTZ (FIG. 1c). Additionally, we included an arginine guanidinium group near the deprotonation site at the nitrogen of imidazopyrazinone (N1 atom) in the RIF. RIFdock was then used to dock each DTZ conformer and associated RIF in the central cavity of each scaffold to maximize protein-DTZ interactions. An average of eight sidechain rotamers including an arginine to stabilize the anionic imidazopyrazinone core were positioned in each pocket (FIG. 1d). For the top 50,000 docks with the most favorable sidechain-DTZ interactions, we optimized the remainder of the sequence using RosettaDesign™ (FIG. 1d) for high-affinity binding to DTZ with a bias towards the naturally observed sequence variation to ensure foldability. During the design process, pre-defined hydrogen bond networks (HBNets) in the scaffolds were kept intact for structural specificity and stability, and interactions of these HBNet side chains with DTZ were explicitly required in the RIFdock step to ensure preorganization of residues essential for catalysis. In the first sequence design phase, the identities of all RIF and HBNet residues were kept fixed, and the surrounding residues were optimized to hold the sidechain-DTZ interactions in place and maintain structural specificity. In the second sequence design step, the RIF residue identities (except the arginine) were also allowed to vary, to identify apolar and aromatic packing interactions missed in the RIF due to binning effects. During sequence design, the scaffold backbone, sidechains, and DTZ substrate were allowed to relax in Cartesian space. Following sequence optimization, the designs were filtered based on ligand-binding energy, protein-ligand hydrogen bonds, shape complementarity, and contact molecular surface.

### Conclusion

[0035] Computational enzyme design to date has been constrained by the number of available scaffolds, which limits the extent to which catalytic configurations and enzyme-substrate shape complementarity can be achieved¹⁶⁻¹⁸. The use of deep-learning to generate large numbers of de novo designed scaffolds here eliminates this restriction; moving forward, the more accurate RoseTTAfold^{TM39} and AlphaFold2^{TM33} should enable still more effective protein scaffold generation by leveraging family-wide hallucination abilities. The diversity of scaffold pocket shapes and sizes enabled the exploration of a range of catalytic geometries and the maximization of substrate-enzyme shape complementarity. The family-wide hallucination method opens up an almost unlimited number of new scaffold possibilities for substrate binding and catalytic residue placement, which is particularly important in cases where the reaction mechanism, and how to promote it, are not completely understood: many structural and catalytic hypotheses can be readily enumerated with different catalytic residue placements in shape and chemically complementary binding pockets. While luciferases are unique in catalyzing the emission of light, the chemical transformation of substrates into products is common to all enzymes, and the approach developed here extends to a wide variety of chemical reactions.

### Methods

### 1. Materials and General Methods

[0036] Synthetic genes and oligonucleotides were purchased from Integrated DNA Technologies or GenScript. The synthetic gene was inserted between NdeI and XhoI sites of a pET29b+ vector, containing an N-terminal hexahistidine tag followed by a TEV protease cleavage site and a C-terminal stop codon. Restriction endonucleases, Q5 PCR polymerase, and T4 ligase were purchased from NEB. Plasmid DNA, PCR products, or digested fragments were purified by Qiagen DNA purification kits. DNA sequences were analyzed by Genewiz. All other chemicals were purchased from Sigma-Aldrich or Fisher Scientific and used without further purification. To identify the molecular mass of each protein, intact mass spectra were obtained via reverse-phase LC/MS on an Agilent 6230B TOF on an AdvanceBio RP-Desalting column and subsequently deconvoluted by Bioconfirm software using a total entropy algorithm. ÄKTA pure M with UNICORN 6.3.2 Workstation control (GE Healthcare) coupled with a Superdex™ 75 Increase 10/300 GL column was used for size exclusion chromatography. DNA and protein concentrations were determined by a NanoDrop™ small-volume 8 channel UV/vis spectrometer. CD spectra and CD melting experiments were performed by the default setting on a J-1500 Circular Dichroism Spectropolarimeter (Jasco). SDS PAGE and luminescence images were captured by a Bio-Rad ChemiDoc™ XRS+. Images were analyzed using the Fiji image analysis software.

### 2. General Procedures for Protein Production and Purification

[0037] Lemo21(DE3) strain was used for transformation with the pET29b+ plasmid encoding the gene of interest. Transformed cells were grown for 12 h in TB medium supplemented with kanamycin. Cells were inoculated at 1:50 ratio in 100 mL fresh TB medium, grown at 37° C. for 4 h, and then induced by IPTG for an additional 18 h at 16° C. Cells were harvested by centrifugation at 4,000 g for 10 min and resuspended in 30 mL lysis buffer (20 mM Tris-HCl pH 8.0, 300 mM NaCl, 30 mM imidazole, and Pierce™ Protease Inhibitor Tablets). Cell resuspensions were lysed by sonication for 5 min (10 s per cycle). Lysates were clarified by centrifugation at 24,000 g at 12° C. for 40 min and pre-equilibrated with 1 mL of Ni-NTA nickel agarose at 4° C. for 1 h. The resin was washed twice with 10 mL wash buffer and then eluted in 1 mL elution buffer (20 mM Tris-HCl pH 8.0, 300 mM NaCl, 300 mM imidazole). The eluted proteins were purified by size exclusion chromatography in PBS. Fractions were collected based on A280 trace, snap-frozen in liquid nitrogen, and stored at -80° C.,

### 3. Computational Design of Idealized Scaffolds

[0038] Our generation of idealized NTF2-scaffolds can be divided into four parts: (3.1) Generation of seed-structures, (3.2) optimization of backbone geometries using trRosetta™-based hallucination, (3.3) generation of structure-conditioned sequence models to bias design, (3.4) design and filtering.

### 3.1 Generation of Seed Structures

[0039] We thought to increase the set of NTF2 structures by complementing experimentally resolved structures from the PDB with highly accurate models generated by trRosetta^{TM22}. To achieve this, we first collected 85 NTF2-like protein structures from the PDB based on SCOPe annotation (d. 17.4 SCOPe v2.05). Corresponding sequences were then used as queries to collect sequence homologs from UniProt™ by performing 8 iterations of hhblits at 1e-20 e-value cutoff against uniclust30_2018_08 database; default filtering cutoffs were relieved (-maxfilt 100000000 -neffmax 20 -nodiff -realign _max 10000000) to maximize the number of the output hits. All the hits were redundancy reduced using cd-hit⁴⁶ with a sequence identity cutoff of 60% yielding a set of 7,573 candidates for modeling.

[0040] To generate inputs for structure modeling with trRosetta™, we built multiple sequence alignments (MSAs) for each of the 7,573 selected sequences with hhblits using a more conservative e-value cutoff of 1e-50; the resulting MSAs were also complemented by hits from hmmsearch against uniref100 (release-2019_11) with the bit-score threshold of 115 (i.e. ~1bit per position). After joining the above two sets of alignments and filtering them at 90% sequence identity and 75% coverage cutoffs, only sequences with more than 50 homologs in the corresponding MSAs were retained for modeling (2,005 sequences). The filtered MSAs along with information on the top 25 putative structural homologs as identified by hhsearch against the PDB100 database of templates were used as inputs to the template-aware version of trRosetta^{™47} to predict residue pair distances and orientations. Network predictions were then used to reconstruct full atom 3D structure models using a Rosetta™-based folding protocol described previously²².

### 3.2 Hallucination of Idealized NTF2s

[0041] Seeking to idealize the native structure seeds, we reasoned that trRosetta™, a convolutional residual neural network, which predicts residue-residue orientations and distances from sequence, could serve as a key component in a protein idealizer. Previously, this network has been used to generate diverse proteins that resemble the “ideal” structures of de novo designed proteins by changing the protein sequence to optimize the contrast (KL-divergence) between the predicted geometry and that of randomly generated sequences¹⁹.

[0042] For our purpose, the desired fold-space is not diverse but instead focused on the NTF2-like topology. To guarantee generation of ideal structures within this fold-space, we implemented a new fold-specific loss-function, which biased hallucinations based on observed geometries in native crystal structures. As many experimentally characterized NTF2s contain non-ideal regions, we began by creating a set (χ) of trimmed but ideal NTF2s by manually removing non-ideal structural elements such as kinked helices, and long or rarely observed loops. For each seed structure, we then used a structure-based sequence alignment method (see 3.3) to find equivalent positions between the seed structure and χ. Residue pairs were considered to be in a conserved tertiary motif (TERM) if there were 5 or more equivalent positions in χ. The smooth probability distributions based on observed geometries in χ were then computed. For distances we used a Gaussian distribution with mean equal to the true distance denoted by D and standard deviation denoted by σ equal to 0.5 Å. The probability density function for distances d is given by:

$$f \left(d ; D , σ\right) = \frac{1}{\sqrt{2 π {σ}^{2}} exp \left(- \frac{{\left(d - D\right)}^{2}}{2 {σ}^{2}}\right)}$$

[0043] Using this density function one can construct a categorical distribution for binned distances by evaluating this function at the centers of the bins and then normalizing by a sum of all values in different bins. Similarly, a von Mises distribution was used for omega angle smoothing with probability density function given by ƒ(ω; Ω, κ) = N(κ) exp[κ cos(ω - Ω)] where N(κ) is a normalizing constant, Ω is the crystal value, κ is the inverse variance chosen to be 100, and ω is the smoothed angle. For phi and theta angles a von Mises-Fisher blur is given by ƒ(x; µ, κ) = N(κ) exp[κ µ^{T}x]where N(κ) is a normalizing constant, µ is a unit vector on a 3D sphere corresponding to the phi and theta angles from the crystal structure, x is a smoothed unit vector, and κ is the inverse variance chosen to be 100.

[0044] Next, we converted those probability distributions to energy landscapes (ie - negative log likelihoods) and sought to minimize the expected energy. This soft restraint encouraged the network to seek out the consensus structure, while still allowing deviations where needed. Specifically, we formulated the fold-specific loss as:

$$\begin{matrix}{L}_{f o l d} = {\sum }_{x ∈ \left\{d , \text{ω,θ,ϕ}\right\}} \left[{\sum }_{i , j = 1}^{L} {\sum }_{k = 1}^{{N}_{x}} - {m}_{i j} {p}_{x , i j k} l n \left({s}_{x , i j k}\right)\right] / {\sum }_{i , j = 1}^{L} {m}_{i j} \\ {m}_{i j} = \left\{1 i f i a n d j a r e i n a T E R M ; e l s e 0\right)\end{matrix}$$

where p is the network prediction and s is the smoothed probability distribution of the conserved residue pairs. For the second part of the loss function and similar to previous work¹⁹, we sought to maximize the Kullback-Leibler (KL) divergence between the predicted probability distribution and a background distribution for all i,j residue pairs not in a TERM.

$$\begin{matrix}{L}_{h a l l} = \\ - {\sum }_{x ∈ \left\{d , \text{ω,θ,ϕ}\right\}} \left[{\sum }_{i , j = 1}^{L} {\sum }_{k = 1}^{{N}_{x}} \left(1 - {m}_{i j}\right) {p}_{x , i j k} l n \left({p}_{x , i j k} / {b}_{x , i j k}\right)\right] / {\sum }_{i , j = 1}^{L} \left(1 - {m}_{i j}\right)\end{matrix}$$

where b is the background distribution and Nₓ is the number of bins in each probability distribution (N_{d} = 37, N_{ω,θ}, = 25, N_{φ} = 13). Briefly, b is calculated by a network of similar architecture to trRosetta™ trained on the same training data, except it is never given sequence information as an input. The final loss is given by:

$$L = {L}_{f o l d} + {L}_{h a l l}$$

[0045] We used a Markov Chain Monte Carlo (MCMC) procedure to search for sequences that trRosetta™ predicted to fold into structures that minimize this loss function. We allowed four types of moves with different sampling probabilities: mutations (p=0.55), insertions (p=0.15), deletions (p=0.15), and moving segments (p=0.15). Mutations randomly changed one amino acid to another, with an equal transition probability for all 20 amino acids. Insertions inserted a new amino acid (all equally likely) into a random location subject to the KL-divergence loss. Deletions deleted a random residue from the same locations. Finally, we also allowed “segments” to move, cutting and pasting themselves from one part of the sequence to another, while maintaining the same overall segment order. Here, a “segment” is a continuous stretch of amino acids all subject to fold specific loss, often composed of a single strand or helix. Starting from a random sequence of an initial length (typically 120 amino acids), we used the standard Metropolis criteria to accept or reject moves:

$${A}_{i} = m i n \left[1 , e x p \left(- \left({L}_{i} - {L}_{i - 1}\right) / T\right)\right]$$

where Aᵢ is the chance of accepting the move at step i, Lᵢ is the loss at the current step, Lᵢ₋₁ is the loss at the previous step and T is the temperature. The temperature started at 0.2 and was reduced by half every 5 k steps. Generally, it took 30 k steps to converge.

### 3.3 Structure-Conditioned Multiple Sequence Alignment

[0046] Given the complexity of the NTF2-like protein fold, we hypothesized that it was necessary to impose sequence design rules to disfavor alternative states (negative design). Towards this end, we computed a structure-conditioned multiple sequence alignment based on native NTF2-like proteins. Specifically, we used TMalign⁴⁸ to superimpose each of the 2005 predicted native structures (from 3.1) onto each hallucinated backbone (from 3.2). Next, to find structurally corresponding positions, we implemented a structure-based dynamic programming algorithm, similar to the Needleman-Wunsch algorithm⁴⁹. However, instead of using the amino acid similarity as the scoring metric, we used a tunable structure-based score function. After aligning the two structures, we scored the structural similarity of any two residues by empirically weighting several metrics: (1) Distance between Ca atoms, (2) differences between backbone torsion angles (phi and psi) backbone torsion angles and (3) the angle (degrees) between the vectors pointing from Cα to Cβ in each residue. To calculate the unweighted score for each component, we normalized each by a maximum possible value (180 degrees for angles and 10 Å for distances) and included a “set point” that approximately delineated when we judged a metric to indicate two residues to be more similar than not. Values above this setpoint are positive, indicating two residues are similar and values below the set point indicated two residues are dissimilar.

$$S c o r {e}_{u n w e i g h t e d} = \left(s e t \_ p o i n t - v a l u e\right) / m a x \_ v a l u e$$

[0047] Each value was scaled by its normalized weight and summed to give an overall similarity score between any two amino acids.

[0048] These similarity scores were used as the similarity metric in our dynamic programming algorithm, in place of the typical BLOSUM62 similarity metric. We used a gap penalty of 0.1 and an extension penalty of 0.0. Finally, after concatenating all the structure-conditioned aligned sequences, we used PSI-BLAST-exB^{50,51} to compute sequence redundancy weighted log-odds scores for each amino acid at each position (position-specific scoring matrices, PSSMs).

### 3.4 Design

[0049] To design the resulting backbones, we sought, in addition to the sequence patterns captured in the PSSM (3.3), to further specify the backbone conformation and functionalize the pocket, by installing entire hydrogen bonding networks from native NTF2-like proteins. We compiled two sets of hydrogen bonding networks: a set for the cavity containing 85 networks and another set of networks connecting the C-terminal region of the first helix with the third beta-strand containing 25 networks. In 20 independent attempts for each backbone, we randomly grafted a network from each set, fixed the identities of hydrogen bonding residues, and designed the sequences for all other positions under PSSM constraints. The resulting models were filtered for various backbone quality metrics and for maintenance of hydrogen bonding networks in the absence of constraints, resulting in a total of 1615 idealized scaffolds.

### 4 RIFdock Tuning Files

[0050] The hierarchical search framework of RifDock is a powerful way to search through 6-dimensional rigid body orientations. While originally designed to work with physics-based forcefields, the scoring machinery can easily be modified to do other things. A system was added called “Tuning Files” that allows one to tune the energetics of rifdock by “requiring” specific interactions. Specified interactions can range from specific hydrogen bonds, to specific bidentates, and even to specific hydrophobic interactions. The specifics are that during the RifGen stage, each stored rotamer is compared against a list of definitions in the Tuning File. If the rotamer satisfies a definition, it is stored into the RIF with a “Requirement Number”. Later during RifDock, these Requirement Numbers are available during scoring and the presence or absence of certain rotameric interactions may be used to penalize or even completely discard dock solutions. In this work, the Tuning Files were used to require the specific hydrogen bond interactions between the arginine and the secondary amine in the pyrazine ring of the colenterazine-like substrate.

### 5 Designing Theozyme Architectures Into De Novo NTF2 Scaffolds

[0051] De novo design of luciferases can be divided into three main steps - scaffold construction, substrate placement with required interactions, and sequence design. With the idealized NTF2-like scaffolds in hand, we selected 5 diverse rotamers from AIMNet and used the Rotamer Interaction Field (RIF) docking method³¹ to exhaustively search a large space of interacting side chains to the anionic form of DTZ. Chemically, deprotonation of N1 hydrogen is the first step to forming an anionic species. We first generated RIF using RifGen³¹ to guide placement in the protein scaffolds. We required the placement of a positively charged Arginine sidechain by a tuning file (see below) to stabilize the formation of negative charge N1 atom where the deprotonation occurs initially and enumerated large numbers of possible sidechain interactions with the rest of DTZ.

HBOND_DEFINITION
N1 1 ARG
END_HBOND_DEFINITION
REQUIREMENT DEFINITION
1 HBOND N1 1
END_REQUIREMENT_DEFINITION

[0052] Rifdock was then used to hierarchically search for the best combination of RIF to place on the input backbone. Although the negative charge can move to another electronegative atom O1 via resonance of the imidazopyrazinone core, it is unclear which anionic species is more critical for the luciferase-catalyzed luminescence emission. Thus, we let RIFdock place the polar rotamers on the basis of hydrogen-bond geometry to O1 and apolar rotamers to DTZ without specific requirements. In the next docking step, we parsed the -scaffold_res argument with a list of residue numbers as scaffold backbone positions that were annotated as pocket residues to allow a hierarchical search of RIF placement. We only allowed the RIF placements in the pocket residues and left pre-defined hydrogen bond networks (HBNets) intact. After RIFdock, we continued for Rosetta™ sequence design where the score function was reweighted for higher buried_unsat_penalty⁵² and the amino acid selection was biased by giving a pre-generated PSSM file via SeqprofConsensus task operation. This would minimize buried unsatisfied residues and increase pre-organized architectures in the core that are known to be beneficial for a catalytic pocket⁵³. Two rounds of FastDesign calculation were included: we restricted the RIF rotamers and core HBNets to repacking in the first round while we allowed other residues for re-design based on PSSM during the Monte Carlo simulated annealing procedure. After the surrounding residues were optimized to retain the RIF interactions, we allowed the re-design of RIF rotamers, to find efficient aromatic and hydrophobic packing around DTZ while catalytic residues (the N1 requirement) were still limited to only repacking. The final set of designs was obtained after filtering by ligand-binding interface energy, shape complementarity, contact molecular surface, number of HbondsToResidue, and the presence of N1_hbond

TABLE 1

| SEQ ID NO: | SEQUENCE |
|---|---|
| 1 | PSEEEIKEFLRRFYEAINRGDADAVKELLTPGWTYHHASGQTFTDQEEFREWVEKMFKAGTRLQIDEIRIDGKTVTVHVTMHQTRGNQDHTIRTTDHHRFHDDGKLVETRAHYNHE |
| 2 | ASEEEIRELIRRFYEAFNKGDMEKLKEILAPGAQLHISNGQTFNDLEEITKFFQTMLSQGTKIEIKSIEVRGDTVTVHVTFHTTHGNQDHTVDVTDHYHFDKDGKIRRLQSHFNPR |
| 3 | PSEEEIRRMVRRFFEAFNRNDADALARLFHPGAQMHVSNGQTFNDREEIKEWFERLLSQDVQIEIHSIEVRGNTVTVHWTGHMNQGNQTKTVTATTHFHLVKDGKIVEMRIHINQQ |
| 4 | MSEEEIKEILHALYEAFNRGDMDAFAEYFAPGAQMHISNGQTFNDREEIKEFFAQLFKQGVQIEIKEIRIDGDTATVHVEVHRTHGNQDHTYTVTHHWVFRKDGKVVELRQHVNPQ |
| 5 | DFKEEVKRVLKEFYEALDKKDIDTAASFFTDDSTMHVQEGTTFKNKEEIKKWFKEFLDTFPRMHREIKSIHITGDKVTIHVTIHVTHGDRDYTYHITEHHRLDKDGRIKETHIHTNQQN |
| 6 | DFQEQVKEWIKRFVEALDKGDVEKVVSLFTDDWTFHLYQGQTFTNPEEFKEWVERFLRTFKRMHREIKEIRVEGDRATVHVTVHLTQGDRDYTVHVTEHHKFDKDGRITHTQMHENEQK |
| 7 | PDEEAIREWLRQFFRALDEGDMDKAMSLLSDDVTVHFYEGYTATTKDEIKEWFARWYSKFPQMHRQIDSIEITGKTVHVHWTIHLHQGDQTYTYRATTTFHFDHDGRIKEIRITIREEK |
| 8 | PISEEEIKDWVRRFIEAFNKRDADALKSLYSDDSTIHFGDGRTFTNPEEFAKWVKEYLRHSDTRLEIKSIEIHGNTVTVHVQMHTTHPSGQTYTYRVTRHITFDHDGKIKEDHIQTDQLH |
| 9 | SLSEEQIKELLKRFYEAFNRNDADALAELLHPDATMHLSDGSTFHNVEEILKWFREFMKKSDVQIDVKEIEIRGDTVTVHYTMTVNHPSGQTHTVDGRDHFTFDHNGKIVEVRSHYQPQS |
| 10 | PSAEEIIRELKKRLVEAMNKGDMDKLRELVHDDAQFHFNGQTFHDKEEFLEWFAQTSPVKIQIDELHIQQNDDGTYTVTVHVTMHNDDEGKTVRVTAHDRYDMRHNKLVETRFHTDQG |
| 11 | PSDEEIVRELVRRFYEALNNGDADTAKSLLHDDWRLHVDGRTFNSPDEWIEWVKRVPQLHHEIKSLEVRVNHDGTVTVTVHVTVHDSSKNTTHRFTDHHHVDSRHNKIVRTQVHTDNG |
| 12 | PSDEEVARELVRRFIEAWNKKDLDTMFSLLHPDWQYTQNGRTFHSRDEFKEWVRTHPDLKVEVDSIEVRTNPDGTVTVHVEVTARDDTTNQDIKFHEEHHVDSRHNKIVETRQHEDQG |
| 13 | PSDEEIVRELIRRLYEAINRGDMKEIFDLLHPDWQFTNNGTTAHSREEFIERLKKRDQFHVHVDDLHVQINHDGTVTVEVHVTVTDSKTNRHFKVRDEHHFDSRHNKLVETRVHTDPG |
| 14 | PSDEEIIKELVRQFYEAVNNNDMDTLRELLHPDATFTFNGRTFHDVDEFLKWVQDIPQTHHEIKSIEVRVHDDGTITVTVHVTTTDESTKTTVTVHDHYTVDKRHWKIVRVQSHEDKG |
| 15 | PSDEEIARELVKRFYEAFDKKNMDELHEMLHPDWQYTQDGNTWHSREEFLKWASNVPQLRHEIKELHVQTNPDGTITVTVHVEVHDSSTNRTVNVTDHHRIDKRTNKIVETRSHTDNT |
| 16 | PMSKEEVKEVLRRFFEAINKNDRDTMKELLDDDWEFHSSSGRTFHGADEFLEWITQWASTAQIEIKSIEIEIRGDTIHVTVHVTVHETHGNQTHTVDVTEHHRLDARNNKIVETRVHFNQR |
| 17 | VSDEQQERAKQAIERFIEAMNKDPEEVYKLLAPGWRYTDSSTGRTFDKDEFKEMVEKLFKQNFHFQIESIRVELNPDGTITAHVTVQVTNDSTGSTVTVHETHHLDSRTGQIVETRVTPTG |
| 18 | PSDEQQIRDWLKKFYEAWNNNDLDALVELLTPDWTYHHSSGQTYTTLDEFREWVERMLSQDTQINMEEMRIEFDGDTATVTVHYTATNGSTKTTYKATETHHFERDKDGWKIVETRVHHHQT |
| 19 | PSDEEAIRELARRFYEAFNTKDADALVEMYDPNWTYHHSSGRTFTTLDEFKEWVERFLSSDVRLEIKSMEVEVRGDEATVTVEVDVTQRQTGRTFHAHDTHHFRRTKDGWKLIETRTHTHQA |
| 20 | PSDEEAIRELKRRFIEAFNNKDADALARLFHPDAQMHTSNGQTFNTKDEIKKFLEDLLKQDIRIELKSVEIEVRGDTIHVTFHVTVTNSSTGRTWDGTQHDEYRKEPGGWKLVRTEERLNQK |
| 21 | PSDEQIIRDWVRRWVELLNRGDADAVASLYAPDATVHHHDGRTLTSREEIKEWVEEMFSRQVEVHLDSLEIEFRGDKATVHAHLTFTEQRTKRTFKGTATFHFQRTKDGWQLKEQHVHIHQT |
| 22 | PSDEEQIRELVKRLYDALNNGDWEAFASLFHPDAQFHHASGRTLHTLEEIKEWAKQFLSNNIRIEIKEIRIEINGNTITVTVHVTVTNAKTKETFEVTETHHFRKDEGGWYLVRTEVHIRKL |
| 23 | PEVEEAVRELKKRFVEAFNKGDLEALERMFHDDATMHVSNGQEYHSKEEIKEWIKRFLSNDARVEVSIEVQIVNGDEATATSHFHVTYRNGQTYTGTAHDFYRRKDGTWKIIRVELQWHQN |
| 24 | HEIEERIREIIKRLIEAIDRGDLDALEEIYDDDAQMHISDGITFNNKEEIKEWLKRYSSFRTAHEVHVEVHIRNDSHVTVHVTVHYTHENGQHFTVHRTFHFQFENGQVKLKEDRIQRDRQ |
| 25 | MSEQEIREAIREWLRRYYEAFDNGDWEKLSRLMAPDIRMEYNGRTFTNLEEILRFLREFWEKFNTAHEVHIEIHIDDKDTTTVTVEVHVTLHHNGKTFSTTAQHHWHVEFHGRQLRFKEVRTQTHESPQ |
| 26 | MSEEEIREAIKETLRRFYEALDNNDLDTLRSILHPDWQMHYNGEQFTNREEFAEWVDKFWKNWDSRHDVEIHIDMSDDSTTTATVHVHVTFHHNGQQFHVTVDDTHHFRMEGNELKMIETRSQTRENKD |
| 27 | ASEEEIRQIIKRLARALDEGDWDTLAKLYSDDSRIEENQDNGTTIEFTTREEFIRWVREFKKNAEVHREVHIHVDKSTNTATAHMKVHVTHGNKSITMDVTSHFHFTDGKLKEEQVHIRAQE |
| 28 | MSKEEIKRILKQFFEAMDKGDADKLKKLLHPGATFHLANGQTFTDVDEFVKWVEDFFNNVQLHREVHIHIHPNGRTVHVEWTLHLRHGDTKYTIHGRTTFHFKDGKIAEVRFHWDTQET |
| 29 | PDEEKIRQIVEALVEAINHGDLDALESFYTDDSTMHFNEGETLTNREEIKRWFEEFIKKFNVRIEIKSVHVDGKTITVNVTVHLTHNGRTVTYHVQRHFRVEGDKLTDDHIHRNQTE |
| 30 | SSEEEIREILRRLFEAFDKGDLDELKELFHDGWTFHDPSGQTFTTKDEFKEWVKRLLESLSDIKRGDIEIRVQDDGTVTVHVTVHVTDSRTGRTVTIDYTEHHHFRNGKLTETHVHSHQKS |
| 31 | DDREEIKDIIRKFFEAFENGDADKLKELLAEDATFHLYQGITFKSLDEIREWAERLFSTAEFRFDSIEIHIHDDGTATVHWTMTVHHDNQTFHFNATTHFVFENGKIKEVRIHADNTD |
| 32 | DRREEIKDWLRRFYEAFEKGDWEKLARLMDDDATFHLYQGITFTDKEEFIRWFREFISNAEVRFDEIRFHINDDGTATVHYTVTVHHDNKTIHANATDHFVFSDGKVTEIRSHADNQE |
| 33 | DDREKIKEFIKEFFEAFQNGDADRLKELMAEDATFHFSNGTTFTNPEEFREFVERFFSRMDIKIDRIEIHINDDGTATAHVEITVTHDDRTHHVTVTVHDRYVDDKLKERRFHYDNKN |
| 34 | PFREEIKDWKRRFIEAFEKGDMDKLKELFAEDATVHFWNGETATTLDEIKEWFTRLWSTAEFRFEEVRIHIRDDGTVTVHMRVTVRHDNEDRTARYTVHDRYRDGKLTETQFHTDQDR |
| 35 | PDEEEIRDTVRRYYEAFEKGDAEALAELFHDDATFHVSEGITFTTKDEFKEYVSQLLRNAEYRFDSIEIHINDDGTVTAHYTVTVHHSDRTIHINATDHFHFSDKYIQELRSHFDRQE |
| 36 | DDRERIKEWLRRYFEAFEKGDADALKSLFTDDWTFHHSSGRTFTSRDEFKEWFKEIMKNAEYRIDEIRIHINDDGTVTVHVKITVTHDNKTVTMDVTEHHRFTNDRIVETRVHIDNKQ |
| 37 | PWEERIKELLKRFYEALQNGDADALAELMSDDVQFHHSSGTTFDSKEQFREWVERLFSSADFKIDSIEIRFNDDGTVTVHVTVTVHHDNKTIHINATHHWVFRDGKVTRVEARLDNTE |
| 38 | PSEEQLRELLKRFYTAINNGDLDALKELLHDGWQFHSSSGRTFHTKEEFAEWVERMLSNNTRLQIDSMNADQTEPRATVHVTFHTNEGNQTKTVHVTEHHRFKDGKIVETRQHHHTG |
| 39 | PTEEEIKEWVKQYFEAMQNKDVDKLVSLYDPGVQVHFWSGQTFNDREELKEWYERWFSQFEDAQMEIHVEIRGDRVTVHIHVTNPSTKTTTTYTFHFQFSDGRITEVHIHRNDHE |
| 40 | QDEDEKRIKDFIRRFAEAVDKGDWETLRRLLHDDWRFHHSSNIQFDNPEEFVRWYIERFRKEFDEVHRQIDSIEIHGQTATVHMTAHFTRGNKTFTVHVTEHHHFRDGRLVETHVHYDEKET |
| 41 | PDENEEAIKELVRRFFEALDNNDRDTFKSLFHDDAEFHLSDNITFSNADEFVEFFFEKFAREFERVRHEIHSIEIRGNRVRVEWTAHFTRGHKDVTIHGTTTFQVRDGKITRVEIHFDSKDT |
| 42 | PKEDEEAIKEFKRQLVEAFNHKDMDTIKELLTPDIEVHVSDGITFTNLDEFVKWFADKFLKHSDFRMQITEIRIHGHKVTVHVEVHWSHNGSSRTVRVTVHDRYRNGKITSTEFHWHNEN |
| 43 | MSEEEIKETIKRLMEAFDKGDMDTVASLFHPDAQFHISEGITFDNLEEFVEWWFQKFARKITRAHREIKSIEIRGDTVTVRWTVTVTNKDTNTTRHIEGRTTFHFKDGKITEVHFHEKQD |
| 44 | MSEEQIKEWLKRFYEAMDNHDWEALKRLYAEDATFHVSEGITFSNRDEFIEWWFRKFASTIDKSQHDIDSIHIDGDTVTVHVTQHVHHKDTGETRTVKITQHFRFKDGKLKEDRIHHDQS |
| 45 | TSEEQIEELARRMYEAFDKGDWDALLKLVHPDATFHVSEGITFDNAEEFVKWWFEKWRRHVSDMKREIKSIEIRGDRVTVHVEVHVTHKDTGTTVTIRATHHWVFKDGKIVEVHMHYDQS |
| 46 | PSDEEQLKEFKKRFIEALNRGDWKAVAELMSEDFTYYDARTGQTYDYEQFVKMVREFLSKAKDLRIEIKEIRIHGDTVTVHVEFHATHNGETRTVDVTTHDHYKDGKLKETRFHHNHQ |
| 47 | PSDKEQIKEWLRRFYEAFDHGDVEAVAELFSEDAQFTDARRQQTYDYEEFKEMVERMLSQMKDVRHQIDSIHIHGHTVTVHVTVHFTHNGKKVTVDVTEHHEFRNGRIVRTQTHHHPR |
| 48 | TDESEIRELVKRYFEALNKGDLDTVVSLFTPDATIHIYNGETITSLEEFREWVRKFLEDAKDVRFEIKEIRVDGDTVTVHWTVHMTHGNRTYTYRATTHFVFVNGKIKEMRIHMEQQH |
| 49 | PEEEELRKQVEEWLRQFYEAINKGDLEKLKELIDPEQSTFHFNGQTYNFEQFIEIVEKLFRNDIKLEVKQIDIEINDNGTITVTVHVTTHHKDGKTSDSTDHYHFRVENGQLKLVSVESHRQPT |
| 50 | PEEDERKEQVKELVRRLVEAFNRGDMDALKELFTDDDWSFHQNGQQFDADEFIKMLKELFDNGVRIEVKSIEIRVHPNGEVTVTVHVEITFSDGSHLDATEHHHFRKENGQIKLIETRVTHQPK |
| 51 | ASKHEIEEIARRFYEAFDKGDLDKLSELLHPGVRIHFEEEQITFTDKEEFQEWYKEWKKRFQEAHREIKRIEINDGTVTVHVTVHVRHGDETYTYHVTHHWHLKDHKIVEVRIRVDQT |
| 52 | MSEEDIREWKKRFVEALDKGDWEKLHELLHPGARIHYEKYQITFTDREEFIRWYKRLYSQFEEVRREIKEIRVDGGRVTVHLQFHVRHGDETKTYRVTVHDEYRGKKLVSSRFRWDDT |
| 53 | MSEEEIRQIIKRFVEAFNNGDIDTAVDLLYTPDAEVHHSNGQTFHTRESIKKFLKELYKQGTHIEIKDLHVDGDTVTVHVQLHTHHDGQTRTVRVTSHFHFVNKRVTHEQQHYDSN |
| 54 | ASKEQIEEFLKTYYELFNRGDYEAAAEFIYTKDWRFHNNNGETLNTKESVKEWLRKLLSRGTQIQIDSLEVRGDTVTVHLTFTTHDDGETHHVRVTEHHTFQGNRIVRTQQHSDTG |
| 55 | PGEEAIREWIKRYVEAFNNNDLDALASLYAPGATVTFSARGETATDQEEIKKWYEEFLSQDIRVEVKSIHITDDTVTVHVTFQKRDSHQTKTVDVTVHFRFENTKLTEVRYHFNEQ |
| 56 | TDEEQIKDFIKKFYEAFNDWEKFREFIDDNVTFHFEQHQQTFTDKEEVVDYIRKWLESVKSFRLEIKSLEIRGDTVTTHVTIHVNHKDQTRTFHVTEHHTFKDGKLVETRQHVHQT |
| 57 | ASEEEIRRWIKRFYEAFDRGDADALKEMLAEGWQMHQTRNITFDTLDEFKEWVERFQRHTDAHREIKSIRVDGQTVEVHVTMHTRHGDQPKTISVTDTHHFNGRKITSTRAHFDGND |
| 58 | PSEEQLREWVKRFVEAFNNNDLDALRELFDDGVQVHFSKGITFHTREEFAEWVRELLEKTNMRIEIKSIRVDGQTVHVHWTAHWTHGDQPYTSHGTTTFHFGGQKLVEVRFNVDDEE |
| 59 | PEQEEKIRELIKRFAEAFQKGDMDALFELFHPDATYHDSNGQTFHSREEIKEWYERWFSQDWVVEIKEIRINHENNTVTVHMQYHLRRNNQTVNVTYHDRYRGDKLVERQTHRDEGG |
| 60 | TSEEEIREILRRFYEALDKGDLDALEELLTPDWQFHSSNSTLHNIEEFKEWVERWFKSVGEVRREIEEIRITGNHVTVHVTVHVTHNGKEVTVRVTDHHHFKDGKLVETRAHYDNHEK |
| 61 | SSEEQIREFLKRFYEAVDRGDMDKLRELLTPDIQVTFNTETLHNVEEVVDWFREMFERLSDVHREIKRIEVSDGEVTAHVQVHVNHNGKTVTMDVTDHYRFKDGKLVSMRSHTDNRES |
| 62 | PVSEEQLRDWVRRFFEALNKRDLDTLVSLFTPDWQFHHISGVTIHSLEELREWVERWLRTFSDFRIEIDSIEIHGDTIHVHVTIHFTDDRTGRTFTVRITETHHFDKGGKLKETHVHEDRQPK |
| 63 | ADREKIKELLKRFFEALDKGDFDTLKSLMHDDWTVHITHNGQTFTITTREEFEEYYRQLFESVKDVQRHIHSIEIHGDTVTVHFTVTQRHGDKTYHIDITEHHRFEGDKLVETHVHVDHKQ |
| 64 | PLSQEQIKEWLKRFYEALDRGDADAVAELVTDDWTMHINNGITITTKEEFKEWVERRLSQFSDIKRTLEEIRIDDRTVHVHLTVHTTHNGKKVTIHTTDTHHFTDNRLTETHFTEDQKDT |
| 65 | DWREEAEELLRRLYEALDKGDRDKIREILHPDVQYHDSNGITLHTLEEFIEYVTRLLSRFDFQRHIHEIRFSDDGTVTVHYTMHFTHGDQTYTATVTDHFHFTNGKITEVRSHVDQHE |
| 66 | DFREEIKDLIKKFYEAIDHRDRDKLREIVHPDATFHLSEGITFTNREEFEEWVEQVQSHFDTRHQIDEIRIDDSGTVTVHVTVTRHHGDKTQHIRVTEHHRFTDGKIAETRVHFHEER |
| 67 | PQPDQERIEEIVRQLYEAFDKGDLDTIASLLHPDVQVHINRDDETITFNDLEELKEWIERWRSNFDVQRHIDRIEIRGNTVTVHVTIHTTHNGQNYTIHATHHWTFKDGRITRVEAHFRTQE |
| 68 | PSEEEIKEFKRRLIEELWSTRDASAAERYMHPDATYHNSTQTFTNKEEIREFIQQLLERYKRIHVQIDEIRIDGDTATFHVTLQFHHKDGTVHVHVTYHDRYEGKRLKESRAHEDQHD |
| 69 | MSEEEIEEWKRRVVDAFFRNQDAESWAQYYHPDARYSYNNRTFTNMEEIKRWLEEFLSRVKRAHVQLDQVDVDGDTATFHFTAHFHHDNGTVTVHYTVHDRYEGNKLTETQTHTDQHD |
| 70 | MSEEEIKEWVRRMIEAVWSTKDWNAFLSFYTPDATMHYNDQTFTTLEEIRRFVEQVLKEAKQTHVQFDKMDVDGDTVTVHVTIHVHHDNGTVTIHVTRHFEFRGNKLKRDQSHEDQRD |
| 71 | MSQEEIEEWKRRVMDIVFRTKDADAFAELYHPDATVHNGDTTYTDPDEIIKFVREFMSRAKQVHVQIDRVEIDGDTATFHVTITVHHKDGTVHIRVTAHDRYKDNRITETQYDYDQKD |
| 72 | PSEEEIKEWVTRMVEAVFKRNDYSIWLSLVSDDWQLHVNTQTFTTKDEVREWLKKWISDVKQVHIQLDEVRVDGDTATFHFTVHVHHDNGTVTFDQTEHHRFEGNRITETRQHTDQKN |
| 73 | PSREEIKEFKRRAIEAFWSNRNADIWLELYDKDATMHVDNRTFTDKDEIKEWLERMLSRHKRAHVQIDEIRVHGDTATVHVTLHFHHDNGTVTTRATYHDRYEGKKITESREHRDTHE |
| 74 | PTDRSEIKEIIEREIEAFNRRDLDKWASLFHPDATMHLYNGRTFSTLDEIKEWFEKMMSSMRDFRIEVKSIEIHGDTAHVTMTMHVRNDSKDVTINYHVTIHFRNGKIVEKHIRADHQD |
| 75 | PGEEAIKEIITRWYEAFDKTGDAETLAQLLHPDWQFHYNGQRFTNLEEFKEWVERFLKRFPDSEHRIERIEVHGDTVTVHLTVHVRHGDQTVRLPTTDTHRLKDGKIVETHVHTGGDH |
| 76 | MSQEEIKELDRRRAEEAFQKKDPDAFISYFHPGATMHINNGQTFTTLEEIKEWFERFLKEMQDAQIEIKSIEVRGQRVTVHGTITVHRDNKTVTIHMTYTDEYRDGKLTHSEIHIDEQPT |
| 77 | PSQEEIKEWLRRYIEYVFQTGDADAAAKMIHPGWTFHHSSGQTFTDLEEFKEWVKRYQESMQDVQVQIDSIEVHGDRATVHMTLTVHTPTQTFQIHVTEHHQFKDGKITETHQHEDNQPT |
| 78 | DEKDEQALKEFKERFIREVWEKKDADVFVKYIDKDAQFHFSSQTFHNQEEIKEWVQRWFEERVKDAQVEIKRIEFHGKRVTVHVEVHVNHDDGTVTYRYTYHDEYQDGRLKHTTVHEHQHD |
| 79 | PEKDQRAIEEWVRRWYERVWRTGDWDQLAKMLTPDWTVHYNDRTFHDRDEFAKWWREMFEKTFKRVQVQIDRVEIHGDRVTVHVTVHRTSDSGDYTIHTTDHHQFRNGRIVETHIHTDDRS |
| 80 | LDPSQEEQIRQWFRRYYEAMNKGDLETLERLFHDDWTQHFSNGQTITTKEQLKEYIKQITDRNVQIEVHVEIHFHGTDHATVTVHITLHENGSTVHVTEHHHFEFTNGSLKIKETRTTIHGE |
| 81 | PDPSQQEAIKELKTRLVEALNKGDWETFRSLFHPDATMHLSNGRTFTTLDEIVDWFRKMTSNDVKIEVHINIDAIGRDTVQVHVTLHLHYNGQTFTVHATDHYQFTNGQLRIIETQFNYHGS |
| 82 | ADPSQQEQIKEWIRRFVEAFNKGDMETIKELYHDDATVHNYNGRTFTTKEEIVEYIKQLTDQDMKIEVHIEIHFHGNTHATVHVHLTMHARGQQYHFQSTFFFEFTDGKLFLKEERVTTRGS |
| 83 | VDEEQEKQVREWIRRFYEALNTGDMDALKSLYDDDATMHIANGRTFTNPEEIVKWFKEFSDQNWQLHVEVHIEMDGTDTVTVTAHVQAHGNDQTFNITQHFHFEVTDGRLFLKEDRIHRHGS |
| 84 | PMTAEQVVRAFWEAFQKGDWKKLLDMITPGWTLHISQGTTYHSLEEMRRWFEEFQKNNEQMHIQIHRVEVHGDTVTVHMTIHVTHNGETRTYHVTEHHTLSKDGKIVETRQQHDST |
| 85 | PVSAEQVAKRFAEAIAKKDLDELASIYADGATFHVNNGITYKSKEEIKKWWEEMLSNFPELHIQIDRIEVHGDTITVHVTMHTTHNGQQVTFHITSHFTFDKDGRLKSEHFHMNPT |
| 86 | PMTAEQVARFYWEAFQKRDLDAFAEIFHPGATLHIWKGITYHNPEEIKRAFEQWMKEFPQFHIQIEEIRVHGDTVTVHWTVTVHHNGQQYHFHATTHIRLDHNGKIKETRFHVHST |
| 87 | PETAEQVVRKVEEAFNKGDRELFDKMLHPGWQLHHNSGHTWTSKEEVKEWFDRWLKNHPRFHIQVDRVEVHGDTVTVHMTVTTHHNGQQYDFSVTEHHHLSKDGKLTETRQQRDPT |
| 88 | PMTAEQFARAFADALNRGDLDALRRIYHPGATLHIYQGITFHNLDEIKDWFKKWFSQFEEVHFEIKRIEVDGDTVTVHFTVHVTHNGETRTIHVTSHFELSKDGKLVSEHIHENST |
| 89 | PITVEQFVRTLEEALNKGDLDALARLYHPGATMHINNGETYHNLEEIKKWFKEFFESFQETHFQVDEVRVEGDTVTVHVTVHATRNGKTVTMHATSHIEFSKDGKIVSEEIRIHGS |
| 90 | PSEEELKEIKKRFAEEAFNTGQWEKFAEFFHPDATMHINNGTTYTDKEEITRWFQELMSNFPDVRVEIKSIEVRGDTVTSHMTIHVNRNGQTFTFSVTTTDHYKDGKLTETHIHIHGD |
| 91 | PSEEELKTAAKEAVEREVEAFNKGDMDAWKELFHPDATMHNSNGQTYTTLDELKRWVKKLFDNNIRVEFEVEVHIVDSKEVEVHVHFHFHNPDGTTMTVTATDRFRREDSQYFIVERHIHHYE |
| 92 | DKEEEIKQWIKEWYERWITAVNQKDVDKALSLFHEDVTIHYQNGQTYTTKDEVKEWLTQFISRVERIELKSMEIRIDGDTVTVHVHITFTNRQTGRTFHVDITHHWQFKDGKIVSVHEKRDRTDTD |
| 93 | DKEEEMKRLIRELIERYVDALNRKDRDAAAEMFHPDWQFQEASGQTFHSLEEWKEWVTQLMSEVTTIQIRHIEIHIDGDTATVRVTIEITHSKTGRTTRFRQDEHHEFRNGKIHRTRTKRDPTRTD |
| 94 | TSEEQIEEWLRQYYTAINNGDMDAVRELVHPDATFHESNGQQFDTRDQIVEFIERFWKTFADVHIDMKSFEITDNHVTVHYQVHTHHQDGKRVTFDGTDHFQFKDGKLTRLESNRDQKD |
| 95 | MSEEEIERAVREWLREFYRAINQNDLEALRELVHDDWTMHWDGRTFTTKDEVKDWFRKMLENSDITVHFEVHVEYKRDGRVTVTVHAHITHKETGTTTQVDEEHHFQFKDGTVKLLETHARTQPT |
| 96 | SSEEEIREAVKEIIRRFAEALNNNDMDTLRELYAPDATMHIDGQTFTTLDEIVDWFRKFLESFDITIEFEVEIRITKDGSVTVHVHFTVHFNDTGTTTKFTSTFHIQQVNGTFKIKEEHLTTQPT |
| 97 | PDERKIKDWIRRYLEALDRKDLDELKELFTKDWTFHLTGGVTFTNIEQFIEWVERWLSSFPRSRHQVDSIEIHGDTVTVHVTVTLTHPDGKTVHATYTEHHRFAPDGKITETRVHIDQKDT |
| 98 | PDAEEIKEWVERWFEEVFNTGDADRAKELLTPDWQYHLYAEQRTFHTLEEFREWFTEFIKTFQEIHVEWKSVEVRGDTVTFHIEMHTTHNGKKVTFTITEHHRFKDGKLVETHVRIHQRN |
| 99 | PDEEIVRWVREMFERAWNTGDADQAASYYWPDWRVVHNGNKENRDLEEYKEFWERMLRSASDVKFQFDSIEVHGNTVTVHVTVTFHHKDGETVHVHVTETHHFDKDGRLVETRQHSDQRDQK |
| 100 | PDERLIEFYLRYFDYVFNTNDADAMKSAYHPDARFTFDGNTSQISLDEFKEWFKKWVESVKRFHVKWDRVEADGNRVTFHVTIHFHHDSGKTTTVHITFHVVFDKDGQIVEERIHRDTHEHE |
| 101 | MDQSEAEEMIRQFYKRFAELLNRGDIDVLAQLFTPDATFHISNGQTFNSKDEFAEWLEELFRQNWQFEFHLEFKEFNGDHVTVEVHVTMRHSNGKTVHVTATHHWRFGDGELKLVEVRMHFNET |
| 102 | LSEEEIKEILKRFYEALDKGDADKLRELLAPDWRYHNAAENRTWDDKEEWIEEYIKSLRRHAEWQRQIESIEIRGDTVTVHYTVHWHHGDQTRTIRVTDTHHFRGKRIQETQAHWNQT |
| 103 | MSEEEVKEIARQIIKRWFEAVDKGDVDALMELYDKDRARMHINGQTFTTMEEIKRWFEKWASQNIKHDFEVHSQIEGSNVVTTHVTVHVTFSDGSTMQIHTTFFMEYSDSSWKILEQRTNNQNE |
| 104 | MSEKEVKEQIKEFKRRLVEAFNNGDLDAIAELVDKDESTFHFDGQTYTTLEEFLKWVKELLDQNVRLEVEIHIEIEGSNQVHVEVHITFHFSDGRTVHVTSHDRYDLSDSKLKLREMRVHNQGE |
| 105 | NSEEEIQRKIEEWLRQFYEAFNKGDADHMARLVDKDMSTMHSNGQTFTDIEEIKEWLKQLFDQGIRIEFEIHIQINGSSEATVTVHVRFHHPDGSTINVTEHHRFRADDSSLRLVETHQNWQNE |
| 106 | PSEKEIREMVKEWIRQWAEAFNKGDWERLAELYDDTNVEMHISGQTYTTLEEIIKWIQEFLSRDVQVHIEIHIQIHGSNTVTVHVHFTFHFKDGTTVHSTSTFHFDASDSSLKLTSQHVTNQTE |
| 107 | ASEEEIRETLKRFFEAINKKDVDKIASLFHPDATVHFYQGITVTTKDELKEFLEKWFKRLRDVKVQVESIHIDPTGHTVTVHWTMHVNKDDTTITFHATTHFHMKDGKIVEMRIHVEQRD |
| 108 | TSEEEIRRFLRRYYDAFNKKDVDKLEELLHPDWQYHNNTGQTLTNMEEFREWVKELLSRLKDVKIQIEEIHIDSNGHTVTVHVTVHVNNGDRTVTIHTTDHHHFKDGRLVETRVHAQQTS |
| 109 | PEWEEVVRELKRRLIEAMNSRDWSKLAKLIEEIFHDDATLQVNNQPFTTKEEIKEWFRRVASNDIDIEVDTEVQPKDGKYVTVHTTYHMTDKSTGTTTTFHATDHYQLEGNKIVRTTMHSRST |
| 110 | PSKEEIKDWVTKWYQALNHKDLDKVVELFHPDATIHTSTLNITWTTKDEFRKFVESWLRQFPDHRIQIDEIRIDDTSATATVHVTVHLTQNGETYTIKYTEHHTFDSTGQVVETHQTIDPK |
| 111 | PSKEEIKETVKRWFEAFDKHDLDALVELYHDDATITDYSNNTTFTTKEEYRRHVESFLRTFPRMQHDIHEIRIDETNYTVTVHVTTHLTRNGKTKTVDVTFHFTLDHDGKIKEQHTRFNDR |
| 112 | DWEEEIREIIQRFFEAIDNNDRDTIRELLHPDARMEVSEGYTMTNLDEIVKWVEDFFKNWHRMRHEIEEIEFNGKTVTVHWTAHFTHKSGQNYTIHGTTHIHFHDNGKIARLEFHLDQRD |
| 113 | TSEEDERAIKEWVRRFYEALNTDPDAVKEFYSDDAQFHAPDGTQFDTKDEIAEWLRQVASNTDITLHSIEVRTDEDGTIHVTVHVQVTNRTNNQSFTVTQHMTFKSDTYQIKRDELRVDDN |
| 114 | ASEEDKKRIEELIRRFYEALDKGDWKAIRDLFHDDARYHDSSKGRTFDKEELLRMVKEHSKHSSQHHIKSIEIEKRGDTIHVTVHVEVHNNSTGTTFSVTEHHTFVRHGDDWRIVETRQHIQPT |
| 115 | PSKKDEEDIRDMIRKYVEALNNNDLDAVREFYDPDATVHFNSEQRTLSWEDVIRWYEEMLKFRFRIEIKDLHIEQRGDTYTVHVHMQVHFEDTGTTVKVTATFHFEKRGDEWKLVEVHFTFQPE |
| 116 | PSEKEEEDIRQLIKHYADAINNKDVEAIASFYTDDATVRFASEQRDFDAEEVKRWYEEMLKNDHRIQIKSIEIRKSGDTVTVTVHMDVTYSSTGRTVKVTATFHFELRGDRWYLVSVHFHFQPT |
| 117 | ASKKDQEDIKEWLRRFYEAFNRNDLDAIMELVTDDATFRFSRHQKDFDKEEFREWVERFLSQDSRIQIKSIEIRQDGDEYTVHVEVEIHNSSTGQTFRVTHTWRFRKEGDRWKLIEVHFHWQPL |
| 118 | PSEKQQQDIEELLRRFYEAFDKGDLDALRELFHDDVTFHFHSEQRTYDKEEFLEWVERRTRFSTKHQIDSIEFRLHGDEVTVTVHVTTHDETTGTTFRSTHHWRVRQHGDEWRILEVHFTLQPT |
| 119 | PSDEEQIRDWFRRWIEAFNKHDMDTLRELYDPNATFHDSRTGQTYDYEEYIKMVKTTLDRFPDVRMELKSMEIEKRGDEITVHLHFQFHYKKTQTTQHVTQTFHFRREGDRWKLKEQRSREDG |
| 120 | PSDEEAIREIIRQLIEAFDKKDLDALMSYYDEDATFEDASTGQRYNYEQIRELIERWLRRFPNTAHQLDSLEIRKHGDTVTVHVHVTVTYKDTKETHTFTRTVHFVRKGDRFFITRDRTQSDN |
| 121 | PSDQEQVRDIIRRFYEAFDNNDLEKIKELLHPDATFQDSSTGQEYNWEQYVKRVKELLERFPNTAHHIDEMHIEVRGNEATVHAHVRVTYAETQTTTTADHTWFLRRHGDRWFVIRVTTTTRN |
| 122 | PMSEEQIRELLKRYYEAMNKGDVDTIAELFHDDARFHHSNGQTFDKEEYRKWVEEYLKKFDMRIQVKSIHIEIHGDTVRVTVHVEFHNPKTGRTFSITHHWHFDASTNKIKRVREQRDDQE |
| 123 | PASEEQIRDLVRRYVEAMNTKDVDKLVEFYHDDARYIHSNGQEYDKEEIKEWYERFQKRYDAELRIKEIRIQVRGDTVTVQVHVEVHFPKTGRTVTVTAHFFVDARHNKIVRVREQRDDQE |
| 124 | PLSEEQIRELVKAYYEAWNKRDLDALAELLAPDATFEHSNGQQYDYEEFREWVEEFMKKFDAQLRVKEIRIEIRGDTVTVTVHVEVHFSKTGQTYTVTHHWFIDARHNKFKRVQEHTDTQY |
| 125 | PDDKEAAEEFVRRYYEALDNGDLDAIKELFHPDAKFHSSSNQTYDREDFIEMIRQWMSQAKDSKHDIDSIHFDKQPDHITVTVHVTVHNSTEGQTYHFTHHWFFRLTDGSWQLVELREQTDGG |
| 126 | PSDEEAIREVDTQRLEAIDRGDLERLKELVHPDARFHTANHSTYDRDEWLELVKQFVERFPDSKHEITGMEIEIKPNEVTVHARVTVHVDQTGQTFHVQYTIHYRKTDGGWKIVEVHVQHDGG |
| 127 | MNDEQAIKEFKQRYVEALNNGDLDAIRSLFHPDVTFTSADNQTYDWEDFARMIEEWIKTFPDAQIQILSMEIEKTDSEIRVTVHIQVHYPTTGTTHHFTQHDRYRRTDGDWKLVESREQTDNG |
| 128 | PVSQEQVKELLQRMYEAFNNGDMDKLRELFHPDAQFTDSNGQTYNAEEMLEIIEEILRQFPDTQIEVKSIHIQVHGDEVTVTIHYTIRRNGQQFDATDHIRFRRTGDKVQIIEMRSDNSEVKK |
| 129 | PLSEEQIRQWLRRWFEAWNHGDRDAFRELYHPDSTYEDSDGQEYNRDEYLEMVERTLKRFPDARFEIKEIRIQQDGDTYTVTVHFQVTLNGQTYTVTQHFHFRADGSKLQLARQQSDHSNDSN |
| 130 | PMSQEQVKELIKRLFEAFNKRDLEKLERIYHDDATFRDQNGQEYDKEEFKDMVEKFMKTFPDFQLHIDSVEIRIHGDTATVHVHVTAHLRGQEFRVTSTIHLDAQDSEIKIISETVNRNEVKK |
| 131 | PVSKEQIKETDKRRFKSFDDGDIEALKELFHPDARYTDQHGQDYDKEEFIRWFKEWKERFPNTAHEIDEMHIQQDGDDYTVHAHVTVHINGQTYHVTYTVIYRYDGDELKIVRVQTHTDDTKS |
| 132 | PEEEEQEEAVRDLIRRYAEAFNRGDAETAARLFDEDWTYYDPSGQTYTTREEFKEWVKTLFSRNLRMEVEVHIQINPDGTVTAEVHFTFHHQSGQTYHVTETHHIRQENGTFKITRTEAHLQPS |
| 133 | PISEEQIKEFLKEYYTAIDNNDVDKIASLYHPDATIHFPNGQTLTNPEEIREWYERWLSQFPGTAHHIESIHIDKTSNTVTVHVTTHFNHNGEKVTVHYTATYHFKDGKLVSYQDNSGDTTG |
| 134 | PDEERIKEILERFFEALQNNDLEKLKELVHDDATFHFDSEKITFTTKEEFIRWVKEFWEKFDMKVEIKSIEIRGDTVHVTWEAHLTKDGQTYTFEGHTTFTFKDGKIVEVRFHVRRT |
| 135 | DQEEEIRRIIKREVEAFQKKDIDTWLSLFHDDARVHYTRHGETYTTKEELREFVERVLRHFDVSVEIKEIRISGQTVTVHVTVHETHNGQKYTFNVTVHDRIKDGKITERRVHWNPT |
| 136 | ASKEEIKEWLERFYEAFNRGDMDALKRIVDPGVTMHVSNGITFHDPEEIKEHFARMFESSKNTRLQIDSIEFQENGDTVTVHVTAHETKPDGKNVTAHITHHWRFKDGKLVEVHEHVDEQPT |
| 137 | MSREEIKDFKRRMVEAFNHKDLDALASLVHDDAQFHSSKGETIHDKEEFKEWVKKTLSVPMRVEIKSIHIDDKDATVTVHLEIHRTHGDKKVTTTATAHDRYTDGRLTETQYNFDDS |
| 138 | PSKEEAEEIARRFYEALNKGDWETIHELFHDDAQMHLPNGQTFHTKDEITEWVKRLISVPMRIHIEKIDFNDSEATVTFHVTMTFTHGDEERHIRATHHWRFTDGKVTELREHIDNS |
| 139 | PEEEEIKEVIKRFFEAIDKRDADKLRELIHPDARMQLNGEQLTNLEEIVKVYFERFVKNFQQAHHEIKSIHIDSNGTVTVHWQLHVTRNGKDVTINATTHIRFRNGKITEMRFHVDNQEN |
| 140 | PLEEEIKELIRRLFEALNKNDWEKYKRLFHPDATQHFNGITLTNLEEIVEWTYKWWVSQYDEWHFEIKSIHIDHDGTVTVHWTVHVTRNGKSITIHATTHIRVRNGKITESENHLDNQEN |
| 141 | PSEEQLKELKKEFIDAFNKGDADKLKSLLTPGSTWETNGNETITTLDEFKEWVERVFSNNTQIEIKEIHIDGDHVTVHVTIHTHHPTRTKTQQATQHDTYDKDNRITNTRENTDPKD |
| 142 | SSEEEVKEIKRRLIEAFNNKDVDALRELFHPDSTFHSDGRQYDNKEEFVDKFFEELVRRYPRAHFQLDHIHIDGNTVTFHMTVQFHQGDQTYHYRITVHDEYRNGRLANTQIHTDNHG |
| 143 | TSEEEIKELVRRFFEALDNRDRDTLKELYSDDAQFHVNGETYHDADEWLKRWFEEFVKKFPSTAHEIKEIRIHGDTVTVHFTVHVTQGDQDYTFHATSHFEFKDGKIKSEQEHMDQTD |
| 144 | MSEEQIRDIVKKFFDAVDKGDLETLKRLLHPDATFHLNGRQFDTLDEFLKKYIEEFQRRFPETHRQIDRIEIDGNTVTVHWTMHVTQGDKHITFHGTTHIHFKDGKITRVQIHIDNTD |
| 145 | TDPRIKEWVERFKTALFEAFNKKDADKFVSIFHPDIQFSDSDGSTIHTLEELKEWFEKFISQFDRIQVDDQEIRVDGDTVTVTTHVTFHRGHKTVTITYHDHYEFRDGRLVNVHTQTDPTK |
| 146 | TDPSIKEIIREFYTRLLEAFNKGDWETVVSIFHPDHTFHFEDGSSITTLDEWREWVERFMSQADRIKVDSLEVRQDGDTVTVHVTVTITHGDETYTFHATYHHVIKDGRFVETHQHNQPEQ |
| 147 | TDPRLRKWLEDFYREFAKALNNKDADLAASVLHPDVTIHLENGETLTTLDEFKEWFTKMASTMDRVQFDEIRIHQHGDTVTVHVTVTITHGDETYTFHATHHWVFKDGRLVEVHISTQPQR |
| 148 | TDESIKEFIKRFYEAVFDAFNKKDWKKFVDLFHPDVTLYDTDGRRYTTRDELREFFERLASRFDRIQLDSIEIRQDGDTVTVHIHVTFHHGHKTVHQTITHHWRFDDGRVTEIRQNSDPKD |
| 149 | ASKEQQEQIKDWLRRYFEALNKGDWETLKELFDDDWTVTDASTNTTYDAEEWLRMYRTLLSQGFEFRIEVKSVEIRLNPDGTVTVTVHFTMHVTHNGRTVTLHVTEHHHIRFKDGSLQVVHTQVHTDERHP |
| 150 | PSKEDQEAIEEFLRRFYEALQKKDLDALEELLTPDWRYYDARTNRTYDLEEFKEMVERRIQNGFDVKVEIKSIEFQKNPDGSYTVHVHLQFHFTHNGKTVTVHTTDTHRFEKHDGRWRLIETRFHYDNRHP |
| 151 | PSEEDKKKIEEFVRRFYDALNKNDLDKLKEVLDDDWTYYDARTNERFDLEEYLRRLEELIRQGWETHIEIKSIEIRKNPDGSYTVTAHVTLHFTHNGKHITVHATDHHHIQKKDGTLKFKETRAHYDSKHP |
| 152 | ADPSQQEAIKQIIERYYKALNEGDVDTMVDEIYHPDGRFTYSGADVEQFKEWVKKWLSTFNVKIDITSLEIQGKDNGQVTVTVHVRFQVHQGDKTYTFHVTQHFVFEFTKDGVRIQNDQINRENEG |
| 153 | DEREELKEAARQIAERFYEAFNRGDLDTLYELMAPGWTFHHQGGETYDRDQFREMVEKWLRQKIHLHIKSIEVEVKDDGTVTVTVHVEARQEDTGRTYPFTDHHTVQFTKDSWRIVETHQHRDN |
| 154 | DERKEIEEAIREMIRRYVEAFNRGDADALYELFDDDWRYHHQGGETYDLDQFREMVERIFSQGVRLQLDSLEIEVKDNGTATVTVHLTMTEAQTGRTTHFTEHHHFRQKKDGWRIQRTHQHTSG |
| 155 | DERQEIEEKVRELKKRFIEALNSGDADTVASLFHPGAQFHHDGGETYDLEQFKEMVERFFSAKIEIRLDSVEIRVNDDGTATAHFHFTFHETDTQRTFHGTQTDFYRQTKDGLYIVEVRSHRDG |
| 156 | HDEEAEEKIRQWLTEYYRAIDNGDWEKIAKLVTDDSKFTHRDNGRNETYDKEDLEERIKELANYESQHNLKEIRVQINPGGSSVTVTVHVEVHFHHDTGTTTFHATHHWHFRFENGELKLVEVRVQIDNS |
| 157 | MSEEEVRQAVREFKKRFFEAIDKGDLEKLKSLIHDDARFHHARGQTYNKEEFIEMVEKWHRQDTAHQIDSIEIQFHDDGSVTVTVHVTVHVNHKDKTVTVHVTYHDHYRYGSPGWKIIRMQVHRDHT |
| 158 | TSTEEAKEDIRQFVEEEFKAFNNGDLDKWAELVHPDATFHTDEGTTYDVDQMLEMIEKAVKNNTHVTIDSIEIRQHDNGEFTVHVHITVHTNRDGSTQTVHVTQTDRFDQSSPGWKLIERHTQRDNT |
| 159 | ASKEDQEAIKELLKRFFEAMDKGDLEALKRLVDEDWRYYDASRNQRFDADEFLEMVERQARQDTKRELKSIEIQPTDEGHITATVHVQVHVTRNGETRTYTVTEHHVFVKKNGSWKIVETQVHTDSN |
| 160 | ASPEQQEQIRQLVKRFFDSMDKGDRDAIREFYDDDATYRDARRNQEYDKEQIVEMIERIFRNDTRHEIKEIRIQPTDEGQITVTVHVEVHQTHNGKQVTFTVTSHFRFEFRNGEVYLVSEEVHTDDN |
| 161 | ASEEQQEKIKQWKRRFFEAINNGDLDALRELVHPDAQFTDASTQQTFDVEEYLKRIEELLKQDFQIEIKSIEIRPTDEGRVTATIHVQVHENHNGRTKTVDVTQHDLYQFENGSVKLVSTQTHRDET |
| 162 | ASEELRQAAEDWVRRYAEAWNKGDVDALASLYHDDARYTDDSTQRTWDKEEFRERFERLMSQDMRMEIKRIEFHPTDEGEITVTVHVTIHANHNGRTHTVDVTRHFRFRQQDGEVYLVSDQSTRDSK |
| 163 | ADKEQQEAIKDFKRQYVEAYNKGDMDAIKSLFHPDAQFHDASRNQTYDLDEFIERLERILRQDSRMEIKSIRIEPTDEGEVTATVHVTVTHNHNGKQHHITYTQHDRYVFQDGSVYIVETQIHTDSN |
| 164 | TSKEQREKLEEVIRRFYEAFNRGDLDALKRIVDPDATFHDDSKQQTFDLEEFIKRVEEILSSDVKIEIKSIEFHPTDEGEITVTVHVQVHQNKDGRTQTFTVTNHDVFREENGSFKIVEHQSRTDDN |
| 165 | DSPDQQQIKEIIKRFAEAFDKGDADTVLELVAPDWRYTDARSNTTYDAEEFAEMVKRLASQDLQRQIHSLEIEFRGDTATVHVHVTVHHNKGDRTQTVSVTETHHLQKRNGQWYLVRTEVTHHQT |
| 166 | DSEDQQAIKELMKRLYDAINKGDMKALKDLLHPDVQFTDSRSNTTYDLEEYIDMVKKMLSRDVQVHIESIEVRIHGDEVTVTVHVTFHEHHGDKTHTVRVTHHWRIRKKDGQFYVIEVRVTHNPS |
| 167 | DSEDQQQIKRLKKELIEAFNRGDMDRFKELIHPDAQFHHYYSNTTYDVDEFIEMLEKMLSTDVRVQLDEIHIQQDGDEYRVEVHVTVTWHKDDKTQHVHFTATDRYRKINGQWYIVEHRVRRHQS |
| 168 | PEEEELQEAIKEIIHRFYEALNKGDLDAVMSYYDDDARMHHASGQTYSKEEIRRWFEELLKQGVQFEIKEIRIQVDKDGEVTVTVHVTLHHTGTGKTVDVTQHFRFRRENGSFKLLEDQVHEHDK |
| 169 | PEEEELEEKARRAVKRFFDALNNGDIDAVLSLFDDDWTYHHSSGQTYSKEQFKEMVERFQSQGFEWHIESLEAEVKKDGTVTVHVHVTARQRGTGQEFKITETHHFRFENGSVKIVETHVHTHDT |
| 170 | PQEKELEEQVRDVKRRMFEAFNKGDWQTLSELIHDDATFHHASGQTYDKEQFIRMMEEMFKQGWQLHVDSLRIEIKKDGEVTVEVHVTAHQPGTGRTTHFTSHDRYQQKDGSVKLTETHTHEHST |
| 171 | PKEKEDRDEIKEIKQRLAEALDKGDWKTFRELFHPDAQFHDDRTGQTYDLDEMLEMIQRQASIPARREIKEIRIQFIDNGTATVQVHVQLHQTRGDVDYTTDVTTHDHYTAKSDEWKITETKITVDDKDG |
| 172 | PWKKEAEEQARELVRRLYEALDKGDIDAIREMLHPDFTYHNPSTGQTYDKEQFLEMVERLASIPMQRDIESIRVEIKDDGTVTVEVHVTIHETHGDQDYTVHVTDHYHFRSDSDELKLVELHSTTDTKHD |
| 173 | PEEEELKEQVKEWLEREVEALNKKDLDTWVSLFHDDFRYHDPRTGRTYDKEEMRRMVEEFLKFDFRIEIKEIRFEFLPDGTIRVTVHVQVHVTRGDQDYTVHITYHLQFRRDSDELKITSKQSHSDTKDD |
| 174 | PWEEEMKEQIEKIVRRLVEAWNKRDIDKIVSLYHDDWQYHNEKTGQTYDKEQFKKMVEELLQIPFHIQITSIEFRTHKDGEITVTVHVQVHRHHGDKTYTIDYTEHHRFRAESKEVKIQETHVRTDEKRE |
| 175 | PAGEEDVRTWLKRFYDALNNKDADKVASLYADGAQITFSESNRTLDKEEFKRWVEQMASTDAQFEIKSIEIRFGDDGSVTVTVHVQVHENHGDQTKTVDVTQHFHMRYTDGQWKVTRDEIRFHED |
| 176 | AVGEEKIKEVKRRLAEAFNKKDVDALLRLFHPGAQFHFAESQTTYDQEEFKEWFERYASTDVEMRIDSVEIRVNPDGTVTVTVHMTLHMTHGDQTQTFHVTAHDEYRETQDDLKVAETRFHMHQD |
| 177 | SGGEEEIRRLVKRFADAFNNKDLDAILSLFTDDWRITDARRNQTYNLEQFKEMFERIASQDVQVQIDSIEVRHNDDGTITVTVHLTYHERRGDKNDTFHVTEHHHFQLTQDGMKLVETRVHHRGE |
| 178 | TSEEEQKEQIKELIERLVEAFNKGDRDKFESIYDDDATIRDASDPTDFTKEQFLELVKQFHSQNFHLQITSIEIRINPDGTVTVHVHVQVHLHQGDETKTFNVTSTFFFTQENGSWKIKEERIQFNTHE |
| 179 | DSEEEVREKIKETVKRLFEAIDKGDLDKVRELIHPDATFHHDSGETYSLEEFLEMVEKLARNNSRHHIESLEIRQVDDTTFRVTVHWTLTDDRTGSTLRVTTHIQVRFENGELKITRVEERTDPT |
| 180 | DSEEEAREKIKDFKRRLVEAFNKGDIDALRELFHPDVTFHTSDGQQYDLEEFLQMMEELFRQGVQMHVRSMEIRQVDDTTFTATVHVTLHNESTGTTVDVTFHDHYRFQDGELYLIRSEARTDSK |
| 181 | DSEEEIREKIKELIKRLVEAINRGDADAVASLFDDDWRFHQDQGTTYDREEFKKWVEELNKANVHIEIKSIEIRIVDHNEVTVTVHLQFHNDTTGTTVRVTEHHRFVRKNGQWRVVETRMHTDPL |
| 182 | DSEKEQEEKIREFIKRFYEAIDKGDLDELRELLHDDWRYHHARGQTYDKEEFLKMVEEMHSNDLKHQIDSLEIRVDSENTVTVHVHVTVHNSSTGKTFRFDDTHHFRFQDGELYLTRTETHTDNS |
| 183 | DSEEEMKEKVKEVIERFYEAINKGDLDALRSYMTPDWRYYHWSGQTYDRDEFLKMVKEMNDAGVRVQIDDMEIRIDDHNQVTVTVHLTLHNQSTGTTVKTTDHHTFRFQNGQVYIVSTHVQEDHR |
| 184 | PGQQEDQRAIKEWKERYIEALNKKDWKAVADLVSPDAKFTNNSEQQTFDREEYIKRVREYLEKFDTRFEVKEIRIEIKPGNETFTVHVHVQVHVTHGDETRTFDVTQTDHYTKKNSQWYIVETRWTTREVK |
| 185 | PGEEEARRQAEEIARRFYEALNNKDWEAIARLVDDNAKFTLTATQRTYDRDEMIEMIRRMLEQFDIRVEIKSIEFHIDPGGDSITVTVHGTITFNRGDKQKHVDVTHHWHFKQGDSQLKLTHLQETRRDLE |
| 186 | PGDEESEKEIREFIEREFEAFNKKDWEKWARLVSDDAQFHMASEQRTYDAEEMKEWVRRTLEQFDIKIEVKSIEIRFHPGGDHVTVHVHFTVHETHGDETRTFHVTVTLHFERRNDQWYLVSKHIHIQPQE |
| 187 | MSEKEAEEAIRDTIRRWVEAINKGDADTAKELYTPDATIVHDGQQFDRSLDEIKEFIKKLFDNNVKLHVRSIEIHVDPNGGDVTVEVHVQLTDDRTGKTVDVTFHAHLTINGDEVRIKRQHEHRSDT |
| 188 | PSEKELEEAAREVVKAFYEALNRGDADRLAELLAPDVTFVHSGNQFDLSLEEFKKWVEEFTKAGFTLHVHDMEVEIHESGGTVTVHVNFQLTDHRTGTTYTVRDTYFLQFHGDEVKIKRVESQTDQQ |
| 189 | TSSDEAREAIKEIFRRLAEALNRGDLDTIKELYDDDVTYTNNGETQKRTRDEYKKFAKEFFDNNIKIQIHDMEIHQDPRGGTFRVTVNFTVTNDRTKTTRRFQSHMVLQFHGDEVRIKEEEERTDQL |
| 190 | PSKEDEEQLREFDKRRFEAINRGDWEAVERLMHPDATIHVASRQRTYNLEEFIRMMQELFRQNVQLEIKSIEVRQLSKDTFQVHGHLTVTNRTTGTTFHVDYTVFYRKGSGDWKIIEVRFRTDEEK |
| 191 | ASKEQQEQIREWLKRFYRAFNQGDADALMELLHPDWTYTNESEQRTYSKEEFREMVKKLFDAGVQIKVDSIEIQPDSKDEITVTVHVTVTQKTTGRTWHVTEHHHFRHGSGDMKLIRTRFRMHQQN |
| 192 | PPPEDEEAVRQVIRRYYEAWNNKDADKIMSLYHPDARFTDESKGQTYSYEDYKEMVERILRNSDMRIEIKSLEVRKVSDGRITATVHVQFHHTHGDEHHTVRVTQHFFFQKKDGEFYIVEDRVRIDNN |
| 193 | PPPEDQEQVEETDRRRIEAFNHGDVEAIASLFHPDATYEDSRTGQQFDREEFKEMVERFFKSVDFRIEIKSLEVQLYDEGHIEVTVHVQVHVRHGDEHYTMHVTYTVRYRKVNGTWKIVEMRTTSNDS |
| 194 | DEREESKEAIKEWKRQYVEAWNKGDLDALRELFHPDVTWDGHPYDYEQWVERVERFLRQFDTQLHMDSMEIRIDSDNTTVEVRVTITVHNHRGDRTETYTFHYTDVYDSRHNQLVKSTTHTDT |
| 195 | PHEEEIKEIVKEIVRRWVEAYQNRDMDTLRELYAPDVEFEGLPVDYEEYLEWVERVLKRADVRVEIKSIEIRIDHDNTTVTVEVHVEVHERHGDQDHTYRATYEFVIDRRHNKIKRQREQRDT |
| 196 | DEREEIERKIREFKRRYLEAWDNGDLDKLDELLHPDATWDGNDIDWEQWKEIVRSLLENSDTAHHLKEIHIEINDDNTTVTVTAHVETHHHHGDRTETYRVTYHDHYDRRHDKLTRSTTRRDE |
| 197 | PKAQEDIRQLVKRYFEAMNHGDMDALRSMIHPDATFHFADEQKTFDREEYLERWKQSFDNVDFRIEIKSIRVEQNDNGTYTVTAHWTVTFHHDHRTHTYDGSTTFFVVKDHNGEWKFVEVRENMNQNQ |
| 198 | PEAEEKIREWIKRFYEAFNKRDMEKLKKMIHPDATFHFEDEGRTYDAEEFLEMIEQFLKKFDARIQVDEIEIRIDEDGTITVTVHVTLEVTDSSQTYTHRATHHWFFRQDHDGSIKLVEVRINTDQEQ |
| 199 | PKDEEDIRDIDRKRLEAIDKGDLDKLRSLFHPDATFHFADYGRTYDKEQFLRYMEELTKKVDMRREIKEVHVEKKPSGEITVTVHVTVQFHHPDRTIHRDITYTVFYRKDHNGEWKIIRFHINETQKN |
| 200 | PKWQEDVERLVRRFFEALNKNDMDALDELFAPDAQFTFEDTQQTYDKEEFKEMIEKMLSNVDMRIEIKSIEVRLNDDGTVTVTVHWTATRHHDNSTFTHHGTTTFFFQPDHDGSWKIKELRINSTNEN |
| 201 | MSDEELKEAVEEFDRRRFEAFNRGDLDKLRELYHPDATFHFASEGQTYNLDQFIEMVRELMSRDVKIQIKRIEIQIDSRKDYITVTATFEMHEHRDSRNKTVQYHYTVVYRKGSFKIIEVRVQSDEDS |
| 202 | MSEEELKEVIRQLVRRFYEAMNKGDLDTLKELFHPDAQFHHAARQQTYDLEEFLEWVKEMFERNVRIQVHQIDVQINPNKDTITVTVHVTFHNHETSSNKTVRVRDHYTFQRGHFKILRVQSHVDDDS |
| 203 | PDPSEIQEQVKDFIRRYVEALNKNDLEELRRLFHDDWTYHDTRTGQDYDRDQFLEMVKRRIDAGNRAEFHVDRIEIDMNDGDDVTVTVHMTVTFHHGDQTRDYRVTEHHTFRRGTNSLKIVRTQTTTHNTQ |
| 204 | SDKSEAREIVKDWFRKFYEALDRGDMDAVRELLHPDVTFHNDSTGQTYNKEDFIRRWEEMLRQGNDAQRQLDSVEFDDNETDEITVTFHVTVHWHHNDHTQTVKITNHDRFRRGTNQFYIIEHRSRRNNTR |
| 205 | MDTSEAQEAIKEWKRQYIEAWNKNDLETLKKLIHPDVTFHDSSQGQTYSADDFLERFERMVRAGVRVQVQLDSMEIDQNHSDTYKVTVHLTVHQHHGDKTTTFSVTQHDRYDQSTNDFKVKEVHIHTDQTE |
| 206 | MDESEAKEAIKEWLRRYYEAWNKGDADALRELLHPDVTFHDSSTGQTYTLDDFLERFERLLKSGTRFQIEIKEIRIDPQETDDYRVTVHYTMTVHHGDQTYTFTATDHFRFRYGTNEFKLVEVHSTVDNTS |
| 207 | SDKSERQEEVKEWVKQFYEAWQNNDADALRELIHPDVTFHNDSTGQTYTADDFLRRFEELVKNGARVKVDIHSLEIDDNETDDVTVTVHYTVHRHHGDETQTQRATDHFTFRYGDNGMRLTSVRSTTDDTE |
| 208 | PQEKEQEEAVRDLIRRMFEAFNKKDVDAVLSLYAEDATYHDSSTGRTFSYEQFKEMLKRLSQTDTRLEVDSLEIRFHDDGTVTVEVHVTMHTRSNSQPQTVKVTSQFHIRQENGSFKIKEEHVTHDST |
| 209 | PEEEEFRKAVEELKRRFVEALNKGDWETIARIFTPDSTMTDSNNQTFNLEEIRERVKQLFSNDTKVEIKSIEIRFDPSGRTVRVTVHITVTTTHNGQKKTFDVTAHDVYVQDGDTLKIVHTQFRRRDT |
| 210 | PEEEEMKKAAEEVVRRFYEAFNNGDADALKELVSDDSQFHDSSGQTYNAEEFKEMVEKLLSANVKLEIKSIEFRIHKDGDEITVHVHVQMHQTTNGNTKTFDGTNTDRLRKDGDSFKIVEHRSHWRNT |
| 211 | PTDEELEEAARQWVRRWVEAFNHKDLDALRELYHDDFRYTDSRTQRTYDKEQFEEMLKEQMKFDFRIEVKSIEVRIDSRKNHVTVRVNMQVHETHGDQDHTVDATYEFHFRFDGTSVYLIEQRVHYNPQ |
| 212 | PSDEEIKKQIEEVVRRYVEALNKRDLDTILSLLHDDWTYRDEKTQRDYSKEQFKKMVEEAAESEFRVEMKSLEIRVDHNKEEVTVQVHLQFHHHHGDRTQTIDVTEHHRLRYDGTSWKIIETRVHIREQ |
| 213 | PEEKEMEEQIREALRRFYEAFNNKDMDKIRKLIHPDATFRFEETQRDYDYEQFIKWVEELLSFDTKIEIKSMEVRIHPNGREVTVTVNVQVHVHRGDKTTTQDVQHHWHFRNDGTDWKVISLQIRIRTT |
| 214 | PSKEEIRKQIEEIIRREFEALNKGDLDTWLSLFHPDAKYHDASKQRTFDREQLKEMFERLVKSDFRVEVKSLRIEVDDSGTEVHATVHFQVHFNHGDETHTFDVTTHITFVRDGTSWKIKSKQTHRHSQ |
| 215 | PEKEEIKKQIKEIIERMFEALNRGDMDTAASYFHDDWQFHNNKEGQTYDKEQWKKMVEELLKNDVRMEIKSIEVRVDDSGREVTVTVHVQMHFNHGDRTQTVDITEHHRFVNDGTDWKIIETHVTINEK |
| 216 | PEEEEMEKQVREVIRRLFEALNKGDLDTADSIYHPDATFRFASTQKDYDYEEFKEWVKRLVETSAQLQIHSMEIRIDPSGREVTVHVHFTVHRNHGDTTHTFRVTSTFHLRNDGTGWKIVSEQIQTDST |
| 217 | PEEEEMEKAVREVIRRYFEAWNKGDMDKIEELYHPDATVRLERYQRDFDYEEFVEWVRRVLSFSLQIDIHSLEIHIDPSGTEATVTVHYTVHYNHGDRTKTIHVTSHFHLRKDGTSWKITSEQAHFRET |
| 218 | PSEEDEKRIKEWKRREVEAFNKGDMDKLEELFDPGVTFVHGNETQDRDKDAFKEFVKQLLSQNIQIEIDSIEIHKSSSDGDLTVTVHVTFHNKSTGYTYHITYHDRYRVDGKEVRLVESQERRDNGR |
| 219 | PSKEDQEQIKEIVKQFYEAFNKGDYDKLSRLLDDDHTVHISNGQTITSREEFEKWVREFKSKFNVHIEIKSIEVRQHDDGTFTVTVHVEVHETHNGETRTYKVTTHHEIRKTKDGWQMVRTEVHWNNTGS |
| 220 | MSDDEAKEAIKEWVRRYVEALNKNDLDALDELFDEDWEYHNSAEPRTYDKEEFKKMVEELIRNRLEFRIEIKSIEIRRTNGDDYTVHVHVQVHTHTDGQQHTMNVTETHHFRFKDGELKLKETRENINPT |
| 221 | TSEEEAQEAIKEMVHRFFEALDKGDWKKLADLFHDDGKFHDSSNPTTYDKEEYIRRVQSRVKANIQSHHEIKSIEIRRTNGDEYTVTVHWTLHEHHDGQTRTRNATTHLRFRFENGQVYLIEMRTTWHST |
| 222 | MSEEEQRQQAKEWLERYFEALNKKDADAVASLFDDDWTFYDSTNQQYDKEEFKEMVERMLRHFDAQFDPKEIRFQIHGDNHITVTVHVTVHFHTDGRQHTFHVTEHHHFRFKDGGIKILETRLHRNPS |
| 223 | MSEKEMEEEARRVFEQLMRAFNTGDADAALSLYHDDARFHDSDGRTFSKEEFKEWFKRWADENNAQLHIHDLEVQIHGNSEVTVHVNINVTFHTDGRQFHITFRSTFRLEFHNGELYIVEEHLHTHST |
| 224 | PSDEQEEQIRQTKKRFIEAFNSGDIDQFKELVHPGATFHFSDTGRTFDKEEFIEMIKKLLSQDTKIEVKSIEIRLKDGTEVTVTVHVTFHTHRGNKTQTFDVTFHDHYRQTKDGWKIIEVHITTNPT |
| 225 | PSKEQEEAIREILKKFAEAFNKNDLDKLFSMLHDDWHYHDASTNQTYSREEFREMVERLLSTDVKIEIKEIRIELKDGEEVTVEIHVTYHFHHGNKTKTVDVTEEHHFRFTKDGVRIVETRVTSNER |
| 226 | PSEEQEKQIRELVQRFYEAFNNKDMDKMSELVHDGAQFHFSNTNQTYDKEEFLDMLRKLLSQDVQVEIKEIRVQLFDGEEITVTVHVQMHRNPGNQTQTYSATHHWRFRLTKDGWRIIEVHITTNPT |
| 227 | PSEEAQEQIKQIKDRFIEALNKKDMDAIDELFHPGAQYYNSDTGTQYDKEEFKDMVKKRLSRDVRLEVKEIRITEHDGDHYTVTVHVEVHFHQGNETQTYKVTFHDRYRKTKDGLYIVSTEVTTRPT |
| 228 | ASPEDQSKIEEWKRRYIEAMNRGDLKTVIELFESSPDARVTENGQTYNPEQFKKMVEEFLKKFDFRIEIKSMEIRQDKDGEIHVTVHYTVHVTHNGETQTYHYTSHDRYRKSNGDWKLVRHQTHTQPS |
| 229 | TDPEDQRKIKEWKQRYIEAMNHRDLDALRELVQSSPDATFYLNGQQFDIDQYIEWMQRLLENFDIRLQLDSMEIRTDEDGTIHVTVHITVHVTHNGKTDTYTVTQHDRYEKHNGSLKLVSSRAHTQPT |
| 230 | MSEEEIKEWVKRWAEAFDKGDVDALASLYDDDAEIHYSDGITITSREEFKEWLKKFMRHADVEHKEIHIHIDKRTGTVRVEFHAHETRRGTGETYDATFSRTFHFDDGRLKRDQAHSDQKKT |
| 231 | TSEEEIKEWVQRWLEAFDKGDWKKLVDMLDEDWTYHNSNGRTITTLEQFRRWFEEFKKNADTQHKEYEIRIDSSTGTVTVHYTVEWTQKGTGEKYTTHVTEHHTFTDGKIQETRTHEDTKKT |
| 232 | MSEEEIREWLKQYYEAIDNKDRDKLDSLVTPDVTFHYSDGITLTTKDQYREFVTRVLSNMDVRHTEVEIHVDSTSGTVTVHVHVKVTHPGTGETYDATVTDTYHFSDGRLTEVRSHRDTKHT |
| 233 | STTEEIIEIIRRFLEAFDKGDMDALAELYAEHATMHTPNGRTFTTRDEIREWFRELFEKAEFHRTEVEIHVDKDTATVHVHVTVTHGDETYHARVTSHFRFKDGKLTEERIQVDSGD |
| 234 | MTSSEIVEIDRQRFEAFDKGDMDRLLELMHDDSTMHTPGGRTFTTKEEIKEWLERLLSNSDIKHTELHIHTTKDTVTATVHVTRTHGDQDYHVTFHYHLTYKDGKLTEVHIHSDENS |
| 235 | MDTEAAIQIVRRLIEAFDKGDVDKLLSLYAEDVTIHHPGGETLTTKEEFREWFKQVKENAEFHHETVEIHVDKDHATVHFTVHVTHNNETITINVTSHFRFKDGKIKEEHVHEDENR |
| 236 | MTTEEIIRIVRRLLEAFDKGDVDALLSIYADDVTLHTPNGRTFTTKEEIEEWLRRFQSNAEVHRTEVEIRVDKDHVTVHVTVTVTHGDQTFHFNVTSHFRFKDGKITEERIHIDQGD |
| 237 | PGEEKIREWLKRYFTAFNNKDLDAVDSLVSDDATFHFSQGQTFHDREEFREWVERLLKTFDFQIQITELRADIDGERITVHWTVHFTNSTSTTTIDVTTHFRFDGDKLVEVHFHLNQRD |
| 238 | PGEEKVKQLIERLFEALDKKDIDAFMSLYDDDATMHYADGITFTSKEEIKKWFEEVLSRFDFRHQITNLRLDLDGETVTVHVKVTFTNPTSEHHFDQTRHFRFRGDKLVEDRIQTHQTN |
| 239 | PSDEEIIRELKRQYIRALNTDIDAFARMWHPDATFHYGDQTFTNKDEVREWFREWLKNFHLEIKSIEIHVYDDGRIEVHAHVQAHTPSSTYDFRATDHYRKTKDGQFRIVETRITWDE |
| 240 | PDDEEEIKEWLKRFYEALDRDADQARELLHEHSTMHVYGTGRTFKNREEILEYLRKQAQHYDHEIKSIEVQPHDNGQVTATVHITIHTPTQTFQVTETHRFQKEGDTWKLVETQIRIQPT |
| 241 | PSDEQQIEELLREYYRAINTDMDEFKKLVSDDSTFHFDYFKITFKNPDEVVDWFAKFASKWQFFIESIEIQPHPDGTATVTVHYTVHTDNQTVRATDHFHFEKRGDQWYLIEVRSHFQDS |
| 242 | DAEEEIKELVKREAEALDKGDVDAWASLFHPDARVEHSNGEEYTNLEELKEAIRRFQKNSEVHREIKEIRIDSSTGRVTVHMTMHVTHGDQDHTFHYTVHIQFDKDGKIVEKQVHWDQQD |
| 243 | PDKDEIEELLRRFYEAWNNGDFDKLRSILHPDVQYHHSSGQTFNNIDEITEWIRRFLSNADAQIEIKSIEVDKSRQTVTVHYTMHVTHGDQTHTIHATDHYTFDKDGKITRMQSHFNQQD |
| 244 | DAEEEIKELLKRLYEALDKGDLDKIREILHPDVTVHYSDGTTLTNIDEVAEYVERFKRNAETHRQIDSIHIDSSTGRVTVHVTVHTTHGDSDHTFHATHHWQFDKDGKITEMRVQVHQQD |
| 245 | PSREEIKELIERWYDAFDKGDVDKLLELMHPDATIHFSNGETITTLEEFREWFERWFSQFERMHRQFHSIEFHGKTATVHSTLHLTRPDGRTFTIHQTNHDTFVDDGKITEHRAHLDEKPT |
| 246 | PSEEEIKELLKRFYEAFDKGDWEALLRIIHDDATFHFSKGETITSKEEFREWFERVMSQMSRIRREIKSIHIDGDRVTVHVTLHVTNDDGSHTTIHVTDTYQFDKDGKITRVESHINEQPT |
| 247 | ASPEQQQRLRETVKRFYDYLNNGDIDAVMSLIADDATFHFDGRTFTTREEIKEFFEKWFKNFDVQIQIESIEIHGDTVTVHVTVTMTNDSETQHHRYTETHHLKKDGRIAQTHIQTDN |
| 248 | TDEEQQRQLKTFARRFYEAFDKGDLDKLISLFADDATMHWNGQTFTTLEEIKKWLKEVMDNVDTAHEIKSIEIHGDTITVHVTVHHHHDHETHTVHVTHTWHFDKDGKIKELRAQTNN |
| 249 | ADEEFQRAVKETKRRLAEALDNGDIDTFISLIHDDSTMHVNGQTFTTKDEIREFYERWLSNADVKHDIDSIEVRGDTVHVHVTVTVTHDHETRTYHVTYTDHYHKDNKLVETRIHTNN |
| 250 | ASEEQIREIIKQFAEAFNNKDLDKMESLYDDDATLHISDGTTFTTPEEFRRWLEEILKRFKQLHMEVKDLHVEGDTVHVHVELHFTHDGQQVTVHATSTFHFDHNNKIKEERIHHDSS |
| 251 | PSEEEIKDLLKKFYEAMDKGDMDLLRELLHPDVQVHISSDPKTFNSLEAFLEWVERWNKNVRVRREIDSIEIRGDTVTVTVTMHVTHKNGQNYTFTIHDHYHFDKDGKIVRIESQVHEHD |
| 252 | PSQEELEEIDRRRLEALDKGDLDTFKKLVHPDATFHISEYQVTFTTADEYIEWWARLYSNFEVHREIKEMHITDREVTAHVTVHVTHRDGRTQTIHMTYHVRYDENGKLVELRVQVHHTG |
| 253 | PSEEEIRKIVKRFYEAMDRGDMETLKRLFHPDAQMHIEKHGITFHDRDEIIDWIAKLISNSDVHREIKDQHVTSNTVTVHVTVHWHHKDGKTDTVHVTHHWHFDHDGKIKSVRITLHDTG |
| 254 | PSEEEIREIDTRRIEAFNRGDMDKLAEIFHPDATIHFESYQITFHSLEEFKEWLRRWVEQIDYKIDIESMEITDRTVTVHITVHLHHKDGRTQTVHITYTIHYDHDGKIKHVRFHSDSRG |
| 255 | PSEEELEEAVRQILQRLYEAIDHGDADTIRSLLDDDWRYTNNNHNQTYSRDEFLDMVKKMVSTDVRHEIKSIEIQIHPNGRTVTVTVHVTVHHTHNGSKRTVDVTDHHHFEYKGNDVKIVHTQATHRQT |
| 256 | MSEEEIREAIRQAVRRFIELFNKGDLDQIKSLFDDDWRYTDARHGQTYDRDEFIEMMKELFDRDVKIELKSIEIRINPDGTTVTVTVHVEVHEIHNGQQRTVTVTEHHHFRFSGDTWRIQRTQVHFRQQ |
| 257 | TSSKEAEEAIRDMLRRYYEAFNKGDMEKLKSLVDPDASFHDARTNQQYDKEQWLEYVKELLKQDAKVEVKSIHIQQQPRGDHVTVTVHVEMHVNRNGQTHTYTITDHYHFVRKGDSWKITRVQSHTHQQ |
| 258 | MSEQELKEAIKEFVERYVELLNRGDADTLAELIDEDWRLHDARTNTTYDKEQFKEWVEKTFKNDTKVELKSIHIQVDPNGNTVTVTVHLTYHTTKDGETRTVDVTEHHHFTFEGDSVKLKRTQVHHHQR |
| 259 | MSEEEIKSAIEELVRRFYEAMNKGDMETIERLVHDDATFHNPDTGQTFDKEEFKEWVETLFRRDTKLEIKGIEIHVDPSGKTVTVTVHVHMTTNKDGQTHHYTVQHHWVFRYKDNSFYIVHVTVRTEQQ |
| 260 | PSDEELEKAVREWIKREAEAFNKGDMETWYSLFHPDARFTDARSNTTYDLEEVKRMIKEMVERNTRMQIDSIEVRVDHDRRTVTVTVHVTFQTTRNGKQQTVHVTYHLHFRYEDNTLKIIHKRAHHNQS |
| 261 | MDEEEVKEAIKDTKRRLIEAMNTGDMDKLDEIYHPDAQFTDNNTGQTFDKEEFKEWVKEQHKMDAKIEVKEIRVQQNDNGETVHVTVHVQIHTTHNGENRTFNVTTHDRYQFKDDTVKIVESRYTTNQT |
| 262 | MSDEEFERAIREYKRRLIEAFNKGDMEALRRLYHPDVTFHDARTNQEYDLDEWLEMVKELLRQDAKIELKEVHIQVHDNRKTVTVTVHVQVHVNRNGQTHTYDVTYHDHYRFKDDTVRIVRVQVHHRQT |
| 263 | ADEEELKEQAKELIRRYYEAWNNNDADTIADLLDEDVTFHNHGQTYRLSRDEVKEMVERLASQDYQLHMRSLEARVGDSNTITVTVHVTMHSRHDTGTRTTHFTDHYVFEYKNGEMKIVEVHSSRETRQT |
| 264 | TSEEEVREAVKELLRQYFEAFNKGDWRTIADIVDENVTYVHNGQTYNLNKEQIVEWVKEMKKNNYKLDIESIEIRVGDSKNATVHVTWTMHVTHDTGTRTIRATTTFHFRQSEGPWKIVSVQTDYEERQN |
| 265 | PSEDELKEQAKELIERFFEALNKGDWDTLAKLFTDDVTFVHNGQQYDLNKEQFIEYVKELFKADTKFHVESIEFQIGDSNTITVHVRWTAHTTHDTGTRTVHANTTFHFVANDGPMKIKRVEVDWEERQN |
| 266 | PDEKEMEEEVREFDKRRVEAINNRDLEKVKSLVHPDATFRFAKTQKDYDKEEFAEWVERMLRNDTQIDIDEVHVEIKHKTQATVTGHITFHTTHGNRTITFHVTYHVHYRRGTHGWKLIRLQLHFNDS |
| 267 | PDDKKAEEDLREIKQRLLEALDKGDWDAVRKIVHPDATFHFESHQQTYDLEQFVEWVKQMASQGTQRHIHRIEIEKKDEHEYTVTVHVTAHHTHGTKNVTVRFTFHDRYRRDTHGWKIHEVRVESDDS |
| 268 | SDLQEQIKELIERWVEAWNRKDLEAIDSLYHPGAQVDDNQIDKEQFKKRVKEILDNTDTQLHIDEIRIQIGDDTRITVEVHVTVHRNEGDRTYTFHITTTFHFRLINGQWYLIEQKTHTNST |
| 269 | PEWEEAVREIIRREVEALNRKDLDKWASLYHPGATDHTQNRDLEEMKDFWRKRLENSNIHIEIKEIRVQKGDDTEVTVEVHVTFHWDHGDRRETYHVTYTMFVQLRNGQWKIVRKQEHHNST |
| 270 | PEEEEIRQAVEEIVRRFYDAFNKNDLDAMASLFDDDWRFHNDSTQTTYSRDEFKDMMKKLLEQGWQLHIKSIEIRINPDGSVTVTVHVQAHNQTSNQTVDVTDHHHLRRDGDEWRIVRTQSQSHQT |
| 271 | PEEDEAKRDIKDIARRFYEALNNKDLDKAASLFHDDAQFHFDNTQRTYDKEQFREWVKKMLDQDWQMHIDSIETRVDNDGTYRTTVHVTIQNSTSNQTQHVTHHWVFRKEGNKFKVVELQERTDST |
| 272 | PSKKDEEDIRTWVRRFYAALNNKDLDAVMSLYTPGSQFHFESTNRTFDREEFRKWVEEAMRRDQEFHIKNIRVERDDDDHFTAEVHVEVHNRKTKVTFTVTQHFHFRKSDGRWRLTEDRIRTHEHPK |
| 273 | PSKEDQEAIEEWYRREEEAFNKGDLDTWASLFHDGSTYHDETRNQTYNKEQLREMFKKLFDQGWQMHIKHIEIRLEDKDTFTVRVHFEFHNKSTKNTFHVDATDRFTKSDGRWKLTERRERRHEQPT |
| 274 | PSEEAQKEIERIIREMYEAFNKGDLEAIYSLLAPDWTFHNESNNQTYNREQFKEMVEKLIKAGFKIDVESIEIRAPDKDNYTARVHVTVTNKQTKDTFKTTDTHHFRRSEGTFYLLETRVTMDRHPT |
| 275 | PSDEDEREIREWYKREAEALNSGDVDAWKELFHPGAQFHDQTRNQTFDLDEMREWVEKMIRAGFRFHITSIEIRVDDKDHITVHVHFQVHNEKTGDEFRFDSTDHFRKSHGRLRLTERQIRTEEYPS |
| 276 | PSEEQQEAIKEFKKRFYEALNKGDLETIKSLMHPGATFHFESRGQTYDREEFIEIVEKLIRANFKFQLDSVEIRKDDEDNITVHSTVTMHNDSTQRTFHVDATDHYTYSNGELRLTHSRFRTHEQPT |
| 277 | TDKEQEEKIREWLNRFYEALNKGDLDAIDSLLTPGWTYHDKSRNQTYDKEQFRDMVEKMMRNNLRIEVTSIEIRSDDDTTATVTVHVHVTNDQTGTQFDVTDHHHFRLSTGELRLVETHFETHSKPT |
| 278 | ADPSDQEIVKQLVERLFEAINKGDRDTIKSIYAPDAQMHISQEQVTFDTLEEIAEWLVKWSSRYDIQIDSLRIELHGDYVHVTVHVTIRQRGTGKTIRVTSHITFDKNGWKIKREHVHFDNGE |
| 279 | MSEDEMREAIKEVKRQLIEAMNTGDLDTLRSLFHPDATFEHSSGQQYDLEEFLEMVKKLNENNVRIELKEMHIQIDSDGRHVHVTVHVQFHNATTKQTYKVTAHDRYRFDGDTVKIVETTFHHHPT |
| 280 | TDDEEAEKKVRDWFREYARAFNEKDVDALASFYHPDARLRDPNGRDYSYEEIREWYERVLSNDAQITIHSMEIRFDSDGHHVTVRVTMTFHNSRTGETYTVHAHFHFRFNGDTLKLVHVQYHHHST |
| 281 | PGEEEAEKAVREVLRRLFEALDNKDWKTLSELYDKDATFHHTDHGETQTYTKEQFIRRVRSNKDIQTAHHMKSIEIRIDSDGHNVTVTVHVEVHETRGDKTDTITVTRHFHLRLEGDSWKVKRDTSHRDSS |
| 282 | PGEEEIKEAAKELLRRFYEAVDKNDIDTLRSLLDKDWKYHETRDGKTETYDADQFLERIARNKDVQVHREIKSIEIRVDSDGRTVTATVHVQVHEHHGDKTHTVDVTDTHHLRYEGDSFKIVETHAHYDSG |
| 283 | PQEEEIKEAVKQIVERLIEAINNNDWEKFASLYTDGSTFYLSQTGQHYDLEQFIEWLKQMASTGFQIEIKSIEIRINGDSREATVRVHFTLHQTRNGQDYTIQVTSEIRIRQDDSTFKILSERVHFSDS |
| 284 | MSEEELKRAVREVDERRFEAFNRGDMDTIRDIVHPGAQYHDASKQRTFDKEEYLKMLEELLSQDVKIQIKEIHIEVKDDGTVTVTATVEVHRNHDNETRTVEVHYTIFYRLQDGQWKIVEMRESTDSGE |
| 285 | MSEKELEEAVRDALRKFYEALNNGDWEKVARLVHPGAQIHFASTQRTYDVEEMIEWVKKMFSNDTEIHIDSIEIEIKDNGEVTVHVHGQMHTNHDNRTITARVTDTYHFRLSNGRWKIVELHSTIDNGS |
| 286 | MSEKEFKEQIREWVQRWVELFNQGDADAMKSLYADGATIHFSATQQDYSKDQFREWVREMFEADTKMQVDSIEIHIYDDGTVTVHVHMTLHTHHPDRTQTVQATFTFHFRFENGSLKLTRQEVTYDSRS |
| 287 | MSEEELKEAIKEIKERLARAMDSGDADTFASLVHPGAQFHDERTQQTFSIEEMREMIKEIAKSDTKRQIDRIEIQIYKDGEVEVRVHVTVHTHHDNETKTQWATYTDRYVFQNGQVYLTESRVTYDSQS |
| 288 | ASEEEQREAIKEMIKRLVEAFNKGDADALKRLFHPGWTYHNNAEQRTFDLEEFREWVRKVFSQDTKVQITSIEIEVKDDGRVTVHVHVKYTTHHSDQTRHVDVTETHHVEFHNGQLRFVETHVTWDSGS |
| 289 | ASEEEQREQIKEWIKRFLEAFNNGDLDTLKKLFHPGIQFHFSSEQRTYDLEEFIKMIEELLSQDTKVHLHQVDIEVRDDGTVHVTAHWEFRTHHDNKTKTVRVTTTFVFEFHNGSMRLVEVRITHDDGS |
| 290 | DEEEIKKQIKEILEQFYEAFNKGDMDRIRELVHDDATFHNQSDPKTYNKEQFLRMLEELFKQGVTMEIKSIHIDVKSDDAEATVHVQFHRTHGDETQTYDVTHHWRFRRFGDEWKIVEVHERTHQT |
| 291 | DEEEDKKEIKEWLERYYEAFNKGDMDALRELLSDDAEFHNQSDPKTYDKEEWLEMLEKLWKQGTRMQIDSMEIDPGSDTLTVTVHVTVTTHRGDKTRHTTFTHHWHFRLEGDSWKLVRVEERTHQR |
| 292 | TPEEIEKAMRDIKRRYVEAFNKGDMDTISSLLSDDAQFTFSSDNRTYDKEEYLEMIKKLLSNDAKVEIKEQHIDVKSDTVTVETHVQIHVTHGDETRTYDITTHDHYERRGDQWYIVHTTITTRQT |
| 293 | DEEEAREAAERIIRALVEAMNKGDLEAIMSYYDDDATFTNASNNTTFDKEEMKKWFKDFFSSGTQVQIDSIEIHVHSDEVRATVHLTMHTHHGDKTRTVHYTSHFVLVRKGDEFKIVHEKLQSDQA |
| 294 | TPEEIQEQIKEAVRRMFEAINNGDADAVMELVHPDATFHHESNSTTYDKEEFRDWVEKFFKAGMRIEVKSLEVDVKSDTATVTVHWTVHQHNGDKTRTVNATTHIRFTRFGDEWKIIEVRIRTHQT |
| 295 | PDPSDQEAIRQWFRREVEAINKGDIDAWASLFHPDSKYHHQSGQTYDYEQFIEMFERLMKTVDVKIEIKSLEIRQTKDGNEIEVHVHVTVHENHPNKTRTVQVTQTDRFEKRGDQFYLAERHTHTDGE |
| 296 | IDPSDEEAIRQLIERFYEAFNRKDWKAVADLVHPDATYHNSDGQTYDWEQFVEMVRRRIERFDIKMEIKEIRFQPTPDGNEITVTVHVQVHVTHDNETRTFQATHHWFFRKIGNQWYIIRLEERRNGT |
| 297 | ADPSDQEDIKRIKRRLAEAFNKKDWEAIARIFHPDATFHHENGQTYDWEQYVEMVKRFLEKFDARFEIDHIEIRLDKDGNDFHVTVHVTVHTTNDNQTRTVHITQHDRYRKEGDQWYIIESQTHTSGR |
| 298 | PHEEEQKDIKEWFKRYAEAWNKKDWETLARLFHPDATFHHQSGQTYNWEQYVEMVRRFLSTTDSKIQIHSLEIRLDKDGNKITVHVTWTMHTHHDNQTRTVTGHTTFFFVQEGNQWYVKEVRTTTDGS |
| 299 | PHEEDQRELEEIIRRYYESFNQKDWQAAADIVHPDVKYHHQSGQTYDYEQLVEMIKRLFENADVHIEIKHIEFRQHKDGGRATVQVHVQVHVRHDHKDTTVDVQHHWVFEKRGNTWYIVSVEERTDGS |
| 300 | PEEKEIEEAAREVIKRFYEAFNKRDMDALEELLHPDARFHTYQGETYDVKQFKEMVERLLSLDIKIDIKSIQADTFKDGTATITVHVEVHVRHDTSTHTVRVTHTWHVELQPNGELKIKSLQENRDND |
| 301 | PESEEIQEQIKETIKREAEALNKRDIDAWASLFHPDARYTENNGRTYDYEQMKEMVERWLSTDVQVEVKSIRIDDTKDGTGTGTVHITFTQHHDTETRTVRVTYHIHMERDHNGEVYIKEKHARRHDS |
| 302 | PESEEIEKQIREWLRRFYEAFNKRDLDAIASLFDDDWRYYNHSGQTYDKEQFREMVEKLLSTDAQIDIDSIQVDDTKDGTATVTVHLTVHERHDTEQRTVRTTDHHHFRLQPDGQLKITHTHEHRDND |
| 303 | PESEEIQEKIRQWLRRFYEAFNKGDWEALASLYAPDARMEHNNGQTYDYEQIVEMIKRLLSVPIKMEIKRIEIESTKDGTGTVTVHVQVHTHHPTSTHTVDVTQHIHFEVQPNGELKIKRDRESSHNS |
| 304 | PEEKEIEDLVREWLRRFFEAFNKRDLDKLKEMFDDDWRFHNANNQTYDRDEFKDWVRKLLSVPIRVQVDSIEVKDVKDGTATVTVHVTVHEHTPTKTKTVRVTEHHHFRVQPDGSIKITRTEVRHHDS |
| 305 | PEDEEIKEAVKQVVERFFEAMNKGDLDELKSLFDEDWRYHHASGQTYDLEQFLKMVEEFHSVPTRIQVKELRIDDTKDGTATVTVHVEVHETHKDSHHTQRFTEHHHFERHDSGEFRIVETRTQTDDS |
| 306 | PEDDELRQAAREIIKRLYEAMNNNDLDTLRSLFAPDATFHHNKGETYDLEQFLEMVERLASIDTRIQVDSMEVKDTKDGTATVEVHVTITQRHDTSTHTVRFHHEWHVRRRPNGQVYVKELRIQSNDD |
| 307 | PREEELRRQIREFIKRLVEALNKRDVDHWLSMFSDDWTYHDSRDKKTFDKEEFAEMLKELLKFPFQIQITSIEIRIYPDWRTATVHVTVTLTVHRGDETRHVNATETHHFRFTENDLRIKETRVNYSGEQ |
| 308 | PEEKEIEEEIRDVDKKRVEAFNNRDMDTWKSLFHPDATFHFYEDKKTFNLEEVVKMIKELLSFEMRVEIKEVHIEFEPDKSRVTVTARVQFHVTRGDKTVTVHVDYTFHYQRSKDNWKIVEVRIRTSGDQ |
| 309 | PSKKQQEDIRDIVRALFEAFNKKDWEKMASYYDEDARITFTSTNQTYDKEQFIRIIQELLKQDYHLHVHSIEIRLGSDNNTVTVRVHFTMTQQTTGTTFEATSEIHITREGDQWKIKEEHITMRSQPT |
| 310 | PSKEQQEQIKELKERFIEALNKGDWKAIAELMHPDAKYTDNSTNKTFDREEIEELVKKQFNAKLHFQLDGIEIRLDPSNTDIRVTVHLTVTQADTKTTVKATTHDRYVRFGDEWKIVETQTTRHEQPT |
| 311 | PKEEELKRQVREFDERRIEAINRKDLDKVKKLFDDDVTFHFAATQQTYSAEEFLEMVKEWLDNDVKIDIRSIHIQVVGDGTVHVTVHVTMHVTRNGKTDTVHVTYTITYQLKDGSWKILRMQVHIHPT |
| 312 | VSEEQVEEWVRRFFEAVNKNDRETLKKLFHPDVTFHFNEGDRTITYTTLEEFVEWLEKFAQNYHFEIKSIEIETKGDEVTVHVTWEVTNRTQGHTYEGHTTVRFDKDGRVVEVRFTFDST |
| 313 | MSEEQVKEWVKREVEALNNGDLDAWASMFTPDVTVHFFHGDTTYTFKTLEELKEWLEKWLRNFQIHIKSIEVQTDDSSVTVTVHLQVTERRTGRTFDVTFHDHFDKDGQLVERHVHFNHS |
| 314 | PSKEQIKEFVKREVEIFNQGDLEAWASLYAPDATVHFYHGDETYTFTTREELKEWAEKFWRSHTVQLDSIEIRHDSDTATVHVHLTVHNRDTGKTAKVDSTVHFDHDGKLKEKHVRFRDT |
| 315 | PSQEEIKELVKRFYDALDSGDMDTFDSLIAPDWTYHYYQDNTSITFKTREEFKKWVNEWASFVHRTFRSMEVRKDGESVTVHVEVQVTDSRTKQTFDTRDTHHFDHDGKLRETRSQYHST |
| 316 | PSKEQIEEWLRRFYEAFNKGDADAAKELMDPDSQMHVQEGDETHTMTTQEEIKKWIEEFAKDHEIEIHSIEIRHEDSSVTVTSHVTVHNRKEKQTYEATETHHFDKDGRLVETHTHFHPT |
| 317 | DTPERQEAVRQLIRRYFEAFNSGDWEKLASLYTPDSRVHNPATGTTLNYEQVVRWYQKQMSRDAKMELKSVEIRINDDGTVTVRVTFTMHFTQDGQKYTTHIHATFHVERGDSSWRFKEVRFQRDTRG |
| 318 | DDEKNEEDVRELLKRFYDAINKGDLDKIRSLMDEDWRYTDASRQQTFDLDEFLDMIKKMHSNDTKVQIHSIEVEIHDDGKVTVTVHVTFHSNHNGQTYTTHVTDTHHVDYGDSSWKFVRTQTHRDTRG |
| 319 | DDEEAEKAVKDWLRRFAEAFNKGDMDTLKELFTDDWRFTDARTGTTIDLDQFMDYLRKLLSNNARMQIDSVEIHINDDGTVTVHVHVTIHSTHNGQKYTFHVTETHHFRRGDDDWKVVRTQAHTESRG |
| 320 | DDKDDEEAVRQTIRRWAEAFNKGDADALYELYDEDSTIHDPSTQQTYNVDQFKEMVKKLQSQDVKLQVHSVEVEIHDDGSVTVHVTYTVHSTHNGQPYTVEFHTTFHVEKSEDRYRIVEQRDSNDQRG |
| 321 | MSEEELKRAIKELKKRLVEAMDSGDWETVKKLFDDDVTFHDPSKNQTYSVEEFVRMMTKLASRGIHRQIDSIHIEFSDDGTAHVTVHVTVHERHGDKTHTFTATAHDTYRFENGSLRILSSTFNTDS |
| 322 | DKEEQKKQVEEIVRAFYEAFNKKDLEKIRRMLHPDATYHQQRGNQEETYDYEEFIDMVRERLKFDFRIEIKEIRIQVLDDTQIEVEVHVTFHWTHNGKTKTVDVTHHWVFRLTDTGWYLIELHARHTEK |
| 323 | DFPKAEEDIKRLKKRFVEAMNHNDWEKLARMFHPDAQFVFINGNQREQYDWEEYVRMVQELAKFPFRIEVKSIEVRKVDDTTYTATVHMTVHFNHNGKTNTVTVTQHDVYRQEKDGWKVLETQEQHDQE |
| 324 | DEPEQQEQVERVIRRFYEALNHKDLDTVRELIHPDATFHTFRGDEQQTYDYEQYIRRIEEMAKFDFRIEIKSIEIRVDDKNRVTVTVHVQVHVNRNGQTHTVNVTHHWTLQQTSTGWYIIEVRSRFDNS |
| 325 | DKPKAESDVRETVRRFYEAMNKRDLDKLRELLHPDAKVTQYEGDQQKDFDYEEFLKMVKELASIDFRIEIKRIEVEQKSDNEFTVRVHVELHFNHNGETHTVTATHEWHLRRTSTGWYIIEVRERRDQQ |
| 326 | DEPEVREQVKEFKRRLLEAIDKGDWEKFARLVHPDAQFTHTHGDQSQTFDREEVIRMIQEQSKFPTAHHMKSIEIRKVDEHEFEVRVHVEVHENRNGQQHTVTVTYHDRYRRDSTGVKLIETQTRFTNQ |
| 327 | DQPEQIEHVLEIVRRFYEALNHKDLDKIRELIHPDATFHHTHGDKTETYDYEEFLKMVREMMKFDFRIEIKSIEVRIDSKNEITVTVHVEVHETHNGEKRTVTVTHHWRLRRTKDGWYIIEVRETRDQQ |
| 328 | MSEEEQKEAIKEFKKRVIEAFNKGDWEAVRRLFTDDVTFHHDSGETYDLDQFAEMIKKQKSTDAKMELKEVRIQVDENNTVHATFHVEVHRRHGDKTTTIEYTSHDRYRFENGQMKIVETHIHSRQRQ |
| 329 | MSEQELEEAVREWLERYYEAYNKGDVDALRELIHDDWRNTEENGTTYDKEEFLKMVEEQMSNNTQLDVKSIEVRVDEDGTVTATVHVQMHTTRGDKTHTVDVTETHHFRFKDGQLRLVETRFTHDDKS |
| 330 | TSEKEAEEEIREILRRFYEAFDRGDADALMELLHDDVRFHHESGETVDKEEFRERVERIASTDTAHKIDSMEIRFDSDGRATVTVHVTVHQRHGDKTVTRQVTHHWFFRKKDGEYYIVEVRIHTRQED |
| 331 | MSEEELKEAAKEFVRREVEAFNQGDADAWASLFHDDVQFDHARGTTYDKEQMKEMIERLLSNDTKVQIDSIEVRIDGDGTVHVTVHVTVHTTHGDQDHTYHVTEHITFRLENGRWKVVRKEIHTNQTQ |
| 332 | MSEEELRRAVEEWLRRFYEALNRGDWEAVAKLVTDDATFHFDEGQTYDKEQFVEMIRQMLSFNVQIQIDSIEIRVDSDGTVHVTVHVTVHETRGDKTVTVHITETHTFRFENGRLKLVETHIHTDNTK |
| 333 | PSSEELKEAAREVIERFYEAVNRNDLDKLRELIHPDATFTHESNPQTYSAEEWLKRFEERVRAGAQLHLQIHHIEFQTDDNGEITVTVHVTVTNSQRNKTVEVTHHWFLRNINGQMYIVHVRERTDNKE |
| 334 | PSEEELRELVKEWVRRYFEAWNKNDWEKLKSLFDDDWRFHDSDENTTYDLEEWVERFRQYVSSGNDTQLQITSIEIEVKPGGEVTVTVHYKMTNKKTGTTYDVTEHHRFRNENGSLKLKETRTTTDRKE |
| 335 | PEKKKIKEDIKELIRRYFEALDRGDWEELEKLMDDDWRYHQNYENQTYDKEEFLRWVEKMASQDTAHHIKSMEIRVNDDNTHVTVHVHVEVHHNRNGKTKTVRVTETHHFQRKGDTWKIVETRVTHDDT |
| 336 | PEEKEIREQLKEIVEKFFEAFDKGDVDKLKSLMAPDAQFHFSGENQTYDLEEFLERVQRFASQGTAHELESIEIHVNSDGTHATVHVHWTLHVTRNGETRTFRGTTTFHFQRRGDSWRVVEVEFRVQPT |
| 337 | PEDRETIKELIKRFFDAINNGDRDTLKELLHDDAQMHVAAEQRTFDTKEEIVRWLVEMASTMHIEIKSIEIRKDEGDQWKVTIHWTGRRRNEPSDFDATTHMRFDKSGKIVELRFHVHQT |
| 338 | PEQEERIKEIIERFYEAINHGDMDTLRELLAPDWQFHDNANQITFTTLEEFLQWIAEWAKNFRIEIKDLHIQPGDGDTVTVEVHYTIHNKTNPTTYTATDTHHFDKNGKIKETRSTVHQN |
| 339 | PSEEQQEKIKELKKRLVEAFNKGDWKALRDLFHPDVTFHISDNKTIKTLDEFIEWVKKFFQNIQLHIKSIEIELKDDTTVTVTVHVEIHRTRGDKDDTATVTFHDVYRFENGQLKITESEARFQPS |
| 340 | PKEKEQIEAIREILRQYYEAWDKKDLDKLRELLHPDWTYYDSRTGQQYDREEYIKMVEEMLSKFKDVRHEIDSIEFEINGDEVTVHVHVTVTFNTGNQQHHVQVTETHHFRQEGDRWKIVRTQTTTNNTR |
| 341 | PKEKKMEEQVRDWVRREIEALNKGDMDTWASIFDPDVTFHFSDTGTTYDRDEVKEMFERFLKRFKDTRIEIKSIEIHIDGDHVTVHVTVQVHVNQGDRTYTNHYHQTIHFRFEGDQLKITEKHVTTDNSD |
| 342 | PKEQELEEAAREWARRFYDAIQKHDLDAIASLYAEDSRMHNSDTGRTFDREEIIEMVKQFLERFKDTRVEIKSMEIEIRGDTVTVTVHVTITFNRGNQQYHVNFTQHFHFQREGDEFKLKHDEASTDNSD |
| 343 | PGEESAKEAVKQFFTRFVEAVNKGDMDKVRSLFHPGSTFHHDRKGQTYDLDEFIDIVEKLAKAGMQIQIESIHVEQLPNGQYRATVHWTATVHHNGRTYTFHGTTTVRLEYHGNEWRVVELTVNIDST |
| 344 | PGDETAKEEIKRFLKQLYDAFNTGDMDKIKELLHPGWKYYDATKNQTYDKEQFLEMVKKLLSQGVQLQIKSIEIDKDKDGGWTVHVHVTFTVTHNGENKHFDATETHFFRFEGDTLKLVETRVNEQPS |
| 345 | PSQEQQEAIKDFKRRYVEAFNNGDLEKLKELFHPGSQFTHESHQQTFDREEFIEMLEEMLRHNTKIQIDEIRIELKGTHEVTVTVHMTVTTHHDTETRHVRITQHDHYRLENGTWKLVRTHVETHEQPS |
| 346 | PSKEAEEAIREWIKREVEAFNKGDLDAWVELFHDGAQLHVEATQTTYDKEEMRDYIRKLLSQDTKIQITSIEITQHGEDEYRVTVHVQVHVHHDHKTVTTDVTATFFIKQQDGEFKIVSKHVERDTKDT |
| 347 | PPEEEIAEAARQIVRRLVEAFNNNDMDALEELYHDDARIHQPNGETYDKEEFKEWVREFIEKNNAKVEIKSIQVQSIDSNGEITVEVHVTVTVHRNGQQFHSDVTSQFRFRKKDGSFKILSEHIHTDDKD |
| 348 | PEEEEAKEAAKDTVRRWAEAFNNNDLDKLEELYHDDARIHHASGQTYDKEEWKRWVEEFISKFDTKIEIHSIHIVQIFSDGTITVQVHVTLHANHNGQTYTVHFTYHFRLVKINGDWKILRQEERRDDID |
| 349 | MSKEQIKELLKRLYEAFNKNDLDKLRELFHPDATIHFSRYGITFHDLEEFLEWVERFIKTFNVHIQITEIRIDDTELRVTVHVEVHFHHPGETRTVRVTEHHTFRDGRLVETHTHFQPQE |
| 350 | MSEEEIRELKKRLAEAIDKGDWETVARLMTPGATFHFQSENYTATDLEEFIRWVQEWFKRFPDVQRTLESIEVNGHTVTVHMTVHFHHKDETRTVRVTVHDHYRGNRITESRFHFNEEK |
| 351 | TGKDHIKEILRRFYEAINRNDLDALAELFHPGAQIHFWNGTTLHDLEEMRRFFKKLFEDLEDVKIQIEEIHFDGSTATVHYTVHVHHSSGKTVTFRGTDHFRFRNGKIQELRSHVDSTHGS |
| 352 | PSEEVKEIIRRAYEAFDKGDWETLRRLFTPDAQFTTHNSDGSTIHVTTQDEFREWFERVKSTFTEMHREIKSVDATGDTVTVHGTVHFTRPDGQTYTIHVTHHWTFENGKIKEVHEHIDYGG |
| 353 | ASQEEIKEFLKRFYEAVNRGDLDTAHEMLHPGWTFHHASGETLKSRDEVRKWLEDFSKTYQLEVTSIEVHQNPDGTYTAHVHVNVTNKNTQTTITFSDTHHFDRNGKLVETRTQETG |
| 354 | TSKEEIEEIIRQMYEALNTGDRDAIKEYFHPGAQLHIWNGQTFDGLDEIAEFLVQFASEYQMQIDSIEIHKNPDGTYTVHVHVTVTNKKTQQTYRQHHTWHFDHNNKVVEVRVQMTG |
| 355 | TSEEEIRRWLKEFYEALDNGDLDRLLELIHPGATFHITDGETLTTKDEIKEFLREFFERFSDLKHDITQIDIDGNTVTVHVQVHVHHPNKTVTIDITEHHHFKDGKLVETHVHIDQKDN |
| 356 | PISEEQIREVVKRLFEALDKGDWETFERIYTDDSTIHIDDRTFTDKEEFLRWFEQFHKTFKDVQHDIESIEIRGDTVTVRGTMTVTHGDKTQHYTVNSHFHFKDGKLKSERIHRHRQPR |
| 357 | PTEEEIKQLVEQFYESLNRRDLEKVASYFHDDATMHIDQGTTFTTLEEIKEWFERFLKRFPRFRIEIESIEFRGDTVTVHVTVQHHRRDTGKTFHTRVTHHWRFDKDGKIVELHIHSDTKES |
| 358 | PASEEIIRELVKRYYEEFWNTGDADRAAELLHPDATIHYYNGTTLTTMDEIKKYLEEFLKRFSRVHVEIESMEVRGDEVTVHVRMTTHHGDQTYHYRITHHWRFKDGKIVEVHIHENQE |
| 359 | DELKEIINRILKAIYDSKDPKAARDYFHPDATITFKSEQQTYDLDQYIKWFEEFMRTFPDATFQIDHIRVDGDTVTVHWTVHVTDQRTGETYTTHATTTFHFKDGKITETHYQLHTQKT |
| 360 | PSRERIKELIKRYYDAYNNRDLEALKEYLTPDATMHIDATKITFTNLEEIEEWIRRFLSRYKDFRFEIDRIEIDGDTVTVHVTVHFTHDNNQTFTYEVTEHHHFSDDKIVETRTHVHERK |
| 361 | PEEEEIKEWVKKYIEAIFNTKDIEVARQFLTPDWKFHNNSEQRTYDREEFAEMLEQFQKKFPDAKVQIHSIEIRGDTVTAHITVHVTDKDKDVTIHVTEHHHFKDGKITETRVQEHTQE |
| 362 | PSEEEIKELLKRFYEAFNKGDWETLLDLFSEDSTIHFSNGETLTDLEEIRRFFERVLRNRVQIEVKSIHIEPGAGRVTVHVKFHQNRDGRTYTFDVTEHHQIRGKKIVETHFNWDNHP |
| 363 | TSQEEIKDLIKRYYEAFNRKDLDALSELMTPDGQLHIEYQGITFHSAEEIREWAKRFIEKHSRFHLEIKSIEVRGDTATVHVTAHFTDDDTPTDVTIHITEHHHFKDGKLKETHVRSDTQQN |
| 364 | MSEEEIRQWVRRAVEAFNRKDFDALKEIYDDDWQFHYAGEQRTFHDIEEFLDWLRKFFSEFSEVHMEIKDLHIDGDTVTVHITVHVHHEEEPKTTTIHQTEHHHFRNGKITETEVHFDEQET |
| 365 | MSQEQAEEIVRRLLEALDKGDFEALKEIYDEDAQFHFAARGETLHDLDEFIEWVRRVKSQFSRTAHTPESIEVNGNTVTVHVHAQFHHSEEPKTVDVTMTRHFRFRNGKLVEDRVQMHEQPT |
| 366 | PSEEEIKEWKKQFVEAFDNGDMDALARLMHPDATLDVSNGEQLTTLEEIREWFERFFKTFTSQHTEIEIHFHDDGRVTVHLHVHFTQNGKNITIDVTVHDRYEGKKLTESRFHFHQRD |
| 367 | ASEEEIRELLKRFYEAIDKGDVDAIMRILHPDATFHDSNGETLTTKEELKEWFRRFFESTGMQRTKLEIHIDDNGTATVHVTITTTHNGQTFHIDFTEHHRFKDKKIVETRQHSHQKD |
| 368 | MSEEQLREFKKRFMEAFQRGDLDALAELVHDDATFTDQQTNTTFTSKEEFKKWVEEFLKNSEFRVEIHSIEIRGDTVTVHFTVHVTHGDEHRTIRFTTHDRYTDNKLTETHFHFDNGG |
| 369 | PSEEELRELAKRFYEALNKGDLDALAELYSDDATLHAQQDNITFTTKDEMKEWFKKFMESVDFRIEVKEIEARGDTVTVHVTIHFTHGDKHQTIQFTHHWHFSDGKIKETQESVDTGG |
| 370 | TDEEQIREFLKRFYRAFAEERDANTVASLLDEDSTFHVQNGITFNNQDSIREWFERLIKSVERFRVEIKSIEVRGDTATVHVTIEMHHGDETVTVHVTHHWRFKDGRVVEVHVSTDERR |
| 371 | ANREEIERLKKKAIEAFWRHKDANIFADLMTDDVTFHISNGTTLTTREEVVEWFQRWAETNQRFHIEIKEQHIHGNHATTHVEIHVTRGDQDYTIHVTQHDRYKDGKVTESHIHIDERE |
| 372 | MSEEQIREFLRRMYEAMDKGDLDALRELVHPDATFHFDSGETYNDREEFIEWVRRWQSQFPDVRRQIHSIHIDGDTATVHVTLHVNTPGKTKTVTATHTWRFRDDKIVEVHFHSDDQK |
| 373 | PSQEEIEELVKRLAEAFDKGDAEAVRRLLHPDVTIHFSDGETLTSWEDIKRFVEKFKSQFPDVKRDIESIEVNGDTVTVHWTLHVNTKDSTITNTGTTHIRFKDKRITEIRFHVDKQN |
| 374 | PSREQIEELLRRFYESLDKKDADAIKELFHPGATIHFSDGVTLTDPDEIKEWFAKWLSKFPDSRHEMKSVEFHGDEVTVHVQVHLRDDSRDQTIDVTHHWRFTDNKITRLEARFDRKTS |
| 375 | ASEEEIRQWKRRWVEAFNNNDLDELKSLWHPGATMHISRGITVTDLEEFREWYERFAKQFPDFHIEIKSLEVRGDTATVHLTLTLNHDNQTIHVHFRVHDRYTDKRLTESHFHYDEQRT |
| 376 | MDESELREIDKRRIEAWNNRDPDKLKEHFHPGATVHFSEGVTLTDRDEIKRFFATLLERFKDSRIQIDEQHFDGDTVEVHMTLHFTHDNQTITVHATYHVHYKNKRLVRMQVHRDNRTS |
| 377 | DDESQIRELVKRFYEAFQKGDLDALSEIVHDDAQMHISQENTTFNNKDEIRKWLERVLRELKDVRVEIKSIEIRGDTVTVHVQFHVTHGDETVTVDVTDHYRFKDGKIVELRSHVNQRRG |
| 378 | DDEEEIKETKKRAIDAIQRGDWEALRKLIHPDARFHFASEQITFTTLDEFIEWFRQWFSSVKDVRAEIKEIRIDGDTATVHVQFHVNHGDKTTTIDATFHDRYKDGKLVESQVHFDQKDD |
| 379 | DDESQLRELVKRFYEALEKGDLDKLSKLVHDDATFHFSSEQITLTTKEEFQEWVERWIKRFKDFRFEIKEIRVHGDTVTVHVQVHFHHGDETVTVDITDHYTFKDGKIVEVRSHVDEKSG |
| 380 | DDESQIRELVKRFYEAFAKGDMDKLRELIHDDATMHLSQKQITAKTKEEILKLLEELIRSLKDFRVEIKSIEVRGDTVTVHVQFHVTHNTKDVTIDVTDHYRFKDGKITELRSHSDTKTD |
| 381 | SVSEEQIREFVKALMEAFDKNDWERLARLMHPDATFHHSDQTYPLSKEEIEEWIKRFLKSIKDSHHQIESLEVRGDTVHIHWTVELHDDSRTVTVHATTTIHFKGDKVTEIRTHYDEQPT |
| 382 | PDEEKIEEILRRFYEALDKGDWEKLADLLSDDWKYTNGNETRPGDRDEFIEWVKRFKSQFPDVKRDIRRIEIRGDTVTVHVTIHVNHKDKTKTVHVTDTHHFEGDRIRETHGQTDNQ |
| 383 | PDEEDIKQILKRFYDAMDSGDAEAAASLFSDDVTFYNGNQTFNLGKEEFKEWVERWFSQFQDTHREIKSIHIDGDTVTVEYTVHFNHKDETQTYRYQDHFRFEGKKIKEVRSRRDEQ |
| 384 | MSIEQFVRQWFEAFDKGDVDALLSLYHEGVQIHVTHSSGNTITFDDKDEFREWYTQWIQRWDDMSRQIESIEVRGDTVTVHATVHMTHKTGQRYTVHVTAHFHFRNGKLVEQRTTFDEKKT |
| 385 | PSQEEIKEIVIRMIEAVWKTGDWRIIERYYHPGATVHVHHSDGTTITFTDLEELLEWWERMMRSLKRVHVHIDSVEVRGKTVTVHVTIHVHQGDQTFTFHVTSTFHFDDNGKITSEEVHINQQD |
| 386 | TSEEEIRELLKRFYEAWDKGDWETLVSLLDDDATYHHSNGQTFHNAEEFTEWYKQMMSNMEIHREIHSIEIDGDRATVHFTVHVTHDNEDRTIQGTEHHQFKDGKIVETHVHLDTKNG |
| 387 | PGEETIKELVKRFYEAVDNGDWDAVAKLLTDDATFQVAKEGRQFNDKEEIKEWFRKYWENYDVQRHIHKIDIDGDTVTVHYTVHRTHNGETQTYTATDHFRFRNGKITRVTSHITG |
| 388 | ASEEDQEQAKQMIDTYYEAINTGNAEEAVRKLFDDDATMHNDGQQFNDKDEMIEYIKSIGEVHIEIKEIRITVNPDGTYTVTVHVTFHHGDNTVRVTHHWFLEKENGSWKIKELREHRDQE |
| 389 | SEDEEAAREVVRQYFEALNHNDVDALASLYHDDATMHISEGRTFTTREEIKRWYERFLKESDIRLEVKEIEIRIHDNGEITVHVHVQVTHRETGRTVTVTFTFFLVKIGNRWYIKEVRAHFHQN |
| 390 | PSDEEAIRELKKRFIEAFDKGDLDAIAELLHPDATMHIQNGRTFTTLEEIKEWFKRLMDNMTTAHQIDSIEIRHNDDGSITVTVHVTVTFPETGTTVRVTFHDFYDKRGFKIVETHITWDQNE |
| 391 | PSDEEVIRDWYRQEAEALNNRDVDTWASLFHDDATVHFSNGQTFTTKEEYKEWARELLEKFDFRIQIDSLEVRTHDDGSITVTVHMTVTYNKTGTTYHFTYHDHFDKRGFKLVERHEQVHQRN |
| 392 | MSDEEVIRDLKRRFVEAFNHGDADTMASLFAPDATMHIQNGITFTTREEIREWIEKLLKRFDARMQLDSIEIRFYSNGTVEVTVHVTVTRNETGIDYTFTFHDHYDRSSFQIKRTQVTWRQHD |
| 393 | PFEEQIKEFKKRFIEAFNKGDWKALLDMIHDDARFHFSQENVTFTTKDEFREWFERFISNSDVKIDLKEIHIDGQTATVHFTMHVNHDSRTFTFEVTVHDRYKDGKLVESQFHIDEK |
| 394 | PTEEKIRELVKRFFEAMDKGDMDALKSLLHPGATMHIDEGSTAHDLEEIKEYIARWLSDFRDIRRHLESIEIRGDTVHVHWTATFHHKTGNTYEFRGTTTFHMRGDKIAEIRFHTNQQPT |
| 395 | DQEEIIRQLLRRFFEAINHGDMDTIESLMAPDWTFHYFSGQTFTSKDEFKEWFRRFFESFKDMRIEIKSMEINGDTVTVHVEVHVTHPTGKKITYHVTEHHHFRGNRIVHTQVHERQQET |
| 396 | MSEEEAREAVKEMLRRYYTAWNNNDMDKLEELITPDARFQDARTGREFDLEEWKEMLERLYKTFPGVQIQIDEIRIEIKDGTITVEVHVTMHYQSKKQTTHYTHFWHIELTDGGWRITRVTVQSDSG |
| 397 | PSEEEVREAVKELIRRFIEAINKGDLDALFELYHPDARLHISETGTTYTREEIKEWFKRWFETFPDTQVELKSVEIHVKDGTGTVTIHVEVTYRRDPKTVKFDSHIRIVYTDGTFKIVEEHIHTDSG |
| 398 | ASEQELKEQIKEIKKRFAEALDNGDWDTVRKLFHPDATLHISDGRTFHSLESIVRYIQELASSNLTSRHEIKSMEIEVKSKDHVEVHVHVQVHYDQQPRTVHITFTDVYRYTDGGMKIVETRVHTDH |
| 399 | MSEEEIEREIRETLKRYFEAINKNDVDKLFSLLDEDWTYHHSSGETITTREEFVRLFRQLATRNNDTRIQIDSMEVRIDSPDHVTVHVHVTMTNKYEKRTYHVTETHHFRRTDGGFKIVETRAHFDH |
| 400 | MSEEELEEAARQIVRRYIEAINRNDLDAIASLYHDDARVHYWNGQTFTTREEIKEWFERQIKSGAQVHLQITDMEIRIVSKDRVTVHVHVQIHYEQNPRTYRVTSTFHIVLTDGQWYIIEERIHLDH |
| 401 | ASEKEAEEAAREVIRRYVRAINQKDLDTLKELYAPDATMHHANGRTFTTLEEIIDFFKKQIDNNNDTKVEIKSLEVRVRSKDTITVTVNMDLTNKLNKHTIHVQSHFHMERTQDDFKIKEEHVHIDH |
| 402 | TSEEEAEEAIRRLLREYYRAIDQGDWETLAKLFHDDATYHHANGQTFNSKEEIIRFFKSLFDSGLRTEHQIDSIEVEQKSKDEWTVTVHVTVHIDKESSTYRVTEHHHFRQTDGDFKIVETRVHIDH |
| 403 | PSEKEIEEQVREVIRRYFEAWNNNDFDTLHKLLHDDWTYHHSSGETITNREEFIKRIRELIKNGFQIQLEVKSLEIRVESKDTVTVHVHVTLHFEKHPRTVHVTETHHLRLTDGGWKIVETRAHFDH |
| 404 | MSEEEIKEAAKEVIRRWIEALNKKDLDTLRELYHPGATMHQSNGQTFHDVEEIRKWFEEFMKKFDFQLHLTGIEIEVKDGRTVTVHVHIQFTDSKTGTTVSVTSTFHLEVKNGQLYITEQRNHRHQT |
| 405 | TSEEEIREVLKRFYEAFQEGDVEKLLRLMHPDAQMHVSEGITFNNWEEIKEWLERFFKRFGDMRVEIEEIRISNGTVTVHVTFHFNHKDGTVTIRVTDHYHFKDGKITRIESHHHPQD |
| 406 | PKEEKLIEIAKEIIRRFYEAFNRHDFDEIIELLHPDWTYHHSSGRTFTDPEEVKEWIRRFLSNDNTHIEIKSIEFRTGGDTITVHVHGTLHEHRKDHTQTTHFTETHHFQQSGNDVKLVETRTHWNSDGS |
| 407 | PKEKEMEEAVREFLQREFEALDNKDWEAWAKLLDDSTIHFADSNTTFTSKDEITEFFRQSLEQFDSEHRVKSMHIEIDGDTATVEVHVEVHFKGEGQTFRFTATFHFTFENGELKLKEKQIHTDT |
| 408 | PKEKEMEEKVREIKKQLIEALNKNDWDTFKKLMDDSTMHNPDRGRTFTSPDEIAEWFRRFVETFDVTIEIKSIEIRISGDTVTVHVTVQVHFKGEGQTYTFHFTDHYEVKDGEIKLKSSTIQTQD |
| 409 | PKEEEAREQAKEWLKEFYRAINENDMDALKRLMDDATMHIAQFQITFTTPDEIKKWFEEFIKKFRHRVEVKEIRIEVRGDTVTVQVHVQVHFEGSGQTFRFTDTYHFEVQDGQMKIKELRSQIHS |
| 410 | PSEEDEEDIRQLIERFYKAFNEGDLDALLSLLHDDWTFHEYNGRTLTTREEFKEWVKQWLSNSARIHITEIHIENKDGDTATVEVHVTVHFNTNNKTKTVHTRDTHHFVRINGQWYIVETRVQVDETGD |
| 411 | PSKKQQEDIRDIIRRFAEALNKGDLDALESIYHPHAQMHIYRGITMNSREEIKRWFKEWLSQPFRIHVHSIEIEDKDGDTITAHAEMTVTFTDNGKQKDVTVRRTFHFTLINGRWFLIEDHEHVDNTGT |
| 412 | ASKEQQEKIKEIKQRFFEALDNGDWETLAKLVHDDAQFHFAKGETLTSKEEFKEWVKRFASTPTAHHITEIHIENKHGSEIEVTAHVTFHVTHDGRDLTFHVTTHDRYVEENGELKILETRFNFDDTGD |
| 413 | PSEEAKEAIKELIRRWVEALNNNDRDTLRDLYHDDAQYHDASGQTFDDREEYVQWMTEWFQKFNVKVTILSMEIRKDSEHQYTVHVTFQFHRHTPSSTHTVNVHSTFRVERHGDEWRIVEQHVQRDST |
| 414 | DKREEMEERIRQLKRQLIEAMNNGDADTFISLFHPDATYHHQSGRTFTTKDELKKWFEEFWKKHPTKLENQSMEIQITSEGRATVTVHIQATDDNTGKTVTFTYHDFYQFFGDELYVVRVETQTDE |
| 415 | DERKKAEELIRETKRRFVEAVNNKDVDAIASLFHPDATMHHSSGRTFTTLEEIKDWVEKFLKTFDVHLNVDSIEFQPTTPGRMTVTVHITVTDNDTKTTVHITFTDFYQFDGDTVKIVRTEIYVHE |
| 416 | MSEEEAREAIKEIIRREVEAFNKRDLDAWASLFAPGATIHFANGQTLTDLEEIKEWFKRFLDHFPSRMEVKSLEIRIVDSTTVQVHVTLEVHVHHDNETKTFTVHATDRFELDDTGFKIVERHVHMEEQ |
| 417 | TSEEQIKQWVRRYLEALDRHDIDELAELFSKDWTYHNSRGITFSTLEEFIEWVERWLSQAEDSRHELKSLEIHGDTVTVHVTQHLRHGDKHKTIDITEHHTFKNGRLVRTQTHFDEKD |
| 418 | SSEEKIKEDIKEMLKREFEAIDNHDWEAWKSLFHPDAKQTNSDEKRTYDLEEIVEMIRRWLSTAPDSRHDLHTIHIEIRGDQVHVTVHVHVTVHRNGKQYHQTVTQHVVFRRSNSEWKIISKHVTTRQE |
| 419 | SSEKENKDAVEEIKRQILDAINKGDRDLFKELFHPDATMHISNGRTFNNLEEILEWFKQMTENNFHFELKSFRIEVHGDTVHATFHVDVTERQTNRTFHVQFHDTYVVFNGSWKIVHTQIHYDNS |
| 420 | MSEEEAQEAIRQWKERFVEAINRGDMDALREMVHPDATFHFSDGRTFTNIEEVVEWFKQMFENGIELEIKSIEIHTDGDEYRVTVHITLTERSNNKTVTVTFHDRYRLENGSFKLHESQIHYNKD |
| 421 | TSEEEAKEDIKEWFRRFYEAFNKGDWHKLKSFYHPDATMHLSDGRTFTNRDEIVEWFRRLWSNGVTTHIHSIEVEIRGDQVHVTVHVTLTEHTNNKTVRVTQHVTFDLENGSWKLKRDEIRHDKS |
| 422 | TSEKEIEEAIREFLRRFYEAFNKGDMDALKSFYAPDATFHVSNGRTFHNPDEIKEWFKKLFDQNVEMEVKSVRIEVRGDTATVTVHFHLTNRTNRQTITITQHFHFRFENGELKLKRDEIRIDNS |
| 423 | MSEEEMKEAIKELKRRLVEAMNKNDADKLKEIFHDDATFHGDGRTLKNKEEIAEWFARFISTFRFKIQIDDMHIQFGDGEVTVTVHMTVTFDDTGRNVSVTAHDRYRFTKDDVRIVSTEFRFTN |
| 424 | PSEEDEKQIRELIERFYEALNKGDAELIARLLHDDAQLTVNGRTFNSKEEVKEWVKRFFSHSTHIQVESIEITYDKDHITVTVHVTMHDNQTGKTYHVTDHYFFRKTKDGWKIIRVQSHTQQQD |
| 425 | PSDEEEIREWLKEFYEAFNQGDLDKMAELVSPDATMHVYNGQTFNSLEEIKEYLERVFKTFPTMQIHVRIVRIEIRGDHATVEVEVTAHVTHDGRHTTYHVREEHHFRKTKDGWKLTETHIHRNQD |
| 426 | PSDEEQIREWKKRFIEAFNKKDLDKLRELVHPDATMHVSEGITFTTLEEIVEWLERFFRRFKDVKVSVQIDEIQIHGDHITVHVTVHVTFNHDGEQKHVTVHATDHYRKTKDGWKLVRSQFNWHQQ |
| 427 | SDKEAEEKIREWKKRFIEAFNHKDLDKLRSLLHPDVKYHDTEPQTFDYEELVERIEEFLKKIDVRIEIKSIEIEIHPNGHTYHVTVHITVHMNRGDRTQTYHVTQHDRYELRNGQFYLAETETRTNGG |
| 428 | PKEEKARQQIREFVERLYDLMNKGDADAVASLYTDDATFHFSDTQRTYSKEEFKRMVEKMFRAGVQFHVKSIEIQFDPNDNHVTVHVHVDVTNESTGQTYTFTQTFFFRFEGDELKLTEDRFHLDNS |
| 429 | PSDEEAVREMVRRYVEAMNNNDLDKIKSLYDDDSKYHDASQQRTFDAEELKEWYERFISHFDFRIEIKSIEVRVDDEHTITVHVNLHVTVTHNGETRHHTATYTFFLEKHNGSWKIVEVREHRDDE |
| 430 | DDEEMKEQIKEWLKREMEAWDRGDVDAWAELVSDDAEFHENDTNRTFDKEEVRERIERFVRNNIDAQRQIDSLEIQIHGRTHATVHVHVTIHEQGDNKTRHFTTTDHFEFEDNGVKLKERRTTTYHD |
| 431 | DDKELEDQIREWLRQYFEAFDSGDIDKLRELVTDDATFHNTSTNQTYNKEQFIEMVERFIRSGIDSSHEIHSIEIRINGTEHVTVHVHWTLHRRGGNRTFHGTTTFFFRFEPNGMKITRVQTTTQPD |
| 432 | PDEEMQEAAKQWIERFYDALNKNDLETLYSLFDEDWRYHETDTNQTYDLDQWKEMVERLIKSGIRFRVEIDEIRFETKGHTHLRATVHVTVQTEGGDTRQRFRDTHTFRQEKDGWKVVRTQTTTYHE |
| 433 | PDEEMEEEVRRLVRRYYEAIDSGNLEEVYELLHDDWTYHDASRNQTYDRDQFKDMVRKFLENDLKVQRHLKSIEVRINGTTEVTVHVHVEVHRSRGNTTYNVTDTHHFRRYKDGMKFVETRTHTQPT |
| 434 | PDKEFEEQIREWIQREFEAWDSGDLETWASLYHDDSTYHNTNHQQDYNKEQLKEMLERFFKAGNEAHREIKSIEIQKYGTHTFRATVHVTAQHNGGNQKVNFTYHFFFRFEKDGMKLVEKRETTQPS |
| 435 | PEDEEAIKQFLKRYYEALNRGDMDTIRKLVDDDSTFHDATRNQTYDWEEWLEMLKKQTDNDTKFEIKSIEVETKSSNTITVHSHVQVHTTHNGQPYTFQVTETHHFTLEGDSWKLTETHTHSDSS |
| 436 | PEDEEAIRQIVKRYFEAVDKGDADAVFSLYDEDARWHDSTTGRTFNAEELRERYRKLAERDSRHDIKSMEIRVVDSTTITVTVHVQVTFNQDGQSRTYSVTYHFHITKHGDSWKIVEVHTTRDSS |
| 437 | PKFEEAIKRWLERYYTALNNGDADTVAELLTEDWRYYDSSRNQTYSRDQFKKMVEELLSHDTKHEIKSLEIRVNSKDTATAHVEVQVHRTHNGQQHTFDTHDTHHFEFRGDRIYITHTHFHMDSH |
| 438 | PEMEEQIRQIVKRLYDAMDNGDADAVKSYYSDDSRFTDENHQRTYSAEEFKEMVKQQASNDVRREIKSIEVRINDSRSITVHVTFQLHENHNGQTRTITFHQTLHFVLIGDQWYIKHDHTQTDDS |
| 439 | VDEEDAKEIKEIIERLVEAFNKGDMKTFRDLFHPDWTYYQSDGSTEYDLDQFIEWLERLLSQGVRVEIERIQFDSQDGDTVHVTVHVTYHVTRNGNTRTIHATEHHVFTRFGDEWKIVRTQVHHDERQQ |
| 440 | SPDEDQEQIKEVLRRFYEAWNKGDRDKLRELLDDDWRYHDSNGRQTYNKEEFLEMVEKALSRGFKLEVKRIQIDDQKGNTIHVTVEVHMTWTHNGRRFEATVRDHHTFVKKGDSWKMVRTQSHWDNHET |
| 441 | PEEEDKEKIKEWYKREIEALNGRDLDAWKELVHPDATFHDASRQQTYDVEEVRKMIEELQSHGFRIELKSMEIRFDGDHVTVHAHFTVHFTHGDRHVTTHYTVTDHFQKKDGELKLIERQEHHDTQED |
| 442 | MSEKELEEQIRDFVRRLVEAFNKGDLDALERLYHDDATITFASTGQTYSKEEFKRWVEEWWKSVKGAQVQIDSIEVRVHDDGSVTATVHVTVHQRHGDRTHTFTVTSHFHFRFEGDQLYLIEEHVHIHHQ |
| 443 | SSEKEAEEAARELIRQYYEAVDKGDWEAVKRLFHPDATFHDESRQQTFNLEEFLKMLREWWESVKGVQHDIHSIEIQFHDDGSVTVHVHGTVHVTQGNRTKTYHFTDTYHFRLEGNRWKIVEYRSRRHQA |
| 444 | PSEQEAEEAIREWLRRYYEALDNGDWEALKRMFHPDWTYHNSDTGQTYDLDEFIEMVRQTLRRIQDSRHQIDSIRFEFDDSGQVTVEVHVTVHFNRGDQTHTYHITEEHHFRYEGNDFKIVETHVTTHQS |
| 445 | MSEKEMEEAAREIIRRLAEALNNGDFDTIKELYHPDATITFPSTGSTVDQDQFLRWVREMMERMKGFQIKIDSIEFEFKKDGELTVTVHVTVTVHQGNQTYTFHVTSHIHIRFEGDTVKIVREHITTHQS |
| 446 | NSEEELKEQIKEFIKREMEAIDKGDADAWLSLFDEDVTITQNGNTRPMHAEEFKEMIEQIASNNSNHHVDSIEIQIRGTDEVTVTVHFTVHFTHNGKNVTIHITAHFHFQVRNGDLKVKSKEEHTDNRP |
| 447 | MSEEEMKEAIKQWVREYFEAFQNNDWDKMLKLFTDDWTFTQDGQKQDRTPDEIREWVEEQFKNDAKVEIKSIEIQIEGTTHATVHVHVTFHHTHNGQQVTIDVTETHHFQFENGSVKLVHTRQHRDNKE |
| 448 | MSEEEMKEAAKQVIEQYYEAFQKNDLDKLKSYITDDWTYTNNGQTENRSPEEFKEFVEQQLSQNTTVEIKSIEFRIVGTTHITVHVHVTYHTTKNGETRTFDVTDTHFFQFENGSVKIVHTETRTDNKE |
| 449 | MSEKEIEEQAREIIKRFYEAIDKGDADAVASLYSDDSTFTHSGNTKDVSKDEIKEWVKKFASNNSQHHIKEIHFQVVGKDSVTVTVHVEIRMHHNGQTKTVTVTQHFFFEFHNGSLRIKRDEEHRDEHS |
| 450 | ASEEEARQDAIEILQRYYDALNKGDWEAVLRIVTDDWRYHENNGITLTTREQIRRWVEELFKKFNFQIQIDEIRAQIHDDGSATVTVHVTVTFHDGDKTVTTHTTDHHHFQLRDSRYQLIETHVHRDTKEN |
| 451 | SGEETLREAAKELVRRLFEAFNTGDMDTLRSLYHPGARFDVDEGRTYDKEEYLEMVKKWNSQDWQLQIDSIEIRIIDSTHVTVTVHVTLHNRSTGTTIHITRHITVELRDTQVFVIRDEVHTNS |
| 452 | MGEETLREAVKETIRRLAEAFNKGDLDKLRELYHPDATFHHYSGETYDLEEFLKMVEEWNSNDWHVEIKSIHIQIVDETTVTVTVHFTFTQPKTGRTQHFTSHFHIRFEDSELKITEEHIQEHS |
| 453 | AGEETLEKQARELVQRLVELMNNGDLDALRELFHPDWTYHTNNGETYSLEEFLEMVEELFRQQWRLQVDSLEVRINDENSVTVHVHVTFTQEQTGRTRHVTETHHFRYKDSTLKLTRTHAHRNS |
| 454 | NGEETARRAAEEVVRRFYEAINKGDLDEIRELLHPGWRFHQDQGTTYSIEEFLEMVKELFDQDWRLQIDSIEFRIVDENEITVTVHVTMTNRSTKETRHVTDHHTIRFQSSEWKIVTTHTHTNS |
| 455 | SDSSELQEAVRQVVKRMIEAINKGDRDTLRELYHPDARMHHANGQTFDYEEIIQFMAKLASADIKIDVESIEIKETKSNGEVTVEVHYTVRNKRTKQDVTVTRHFRFQQQPDGSFKLIEDRVQHDDR |
| 456 | PDPSEIEEKIKQWLRRMYEAINKGDIDTLRELFDDDWTYHQQNGQTYDKEEFLKMMEELFRRNVRIEIKSIEIKEFDSRGEATVEVHVQFHNASTGTTVTVTETHRFRFEPNGQIKLVETHQHRDSN |
| 457 | TSDEAEEEIREFDRRRFESFDRGDADAVFELVHPGAQFTDEREQRTYDQEEFKEWVKRVASNNVRHEIKSVEVQQTGENEFTVTAHVTVHNNSTGTTVDVTYTLHYRRQGDRWYLVRVREYWHQR |
| 458 | TSDEIKQAVEEWLKRWFEAFNRGDVDAVASLYHPGATMHLGPTSRDYDYEEIKRFIKEWLDQDWKLEIKRIEIQQVDKDEVTVTVHFQATNKSTGTTVDVTRHLTFRRYGDDWKLVEDRADFRQS |
| 459 | PEEKEAREIVKEIIEREVEAFNKGDMDAWKSLFAPGATFHHSNGTTYDLDEVKKMLEERWRAGVHIEIKSIEIRVKDGETMHVTVHLQMHDRRTGQTFDMTSHIRLERTQDDIKIVEKHSHTDSGS |
| 460 | DDKTAEEIIREVVERYIDAFNKGDWKTALELLDDDWQFHHSSGQTIHTKEEFREWFEKLASDAKIEIKSIRVEKKDSNTYTVEVHVTVTHDSTGQTFTVTEEHHLRREGDDFKIVETRVHVNPN |
| 461 | DEKTQEEQIRQIIREFYDALNKGDADAVMSLFHPDATMHIWNGQTFKTREEIKEWIEKWASNYKIHIKEIRIQFEDHNRITVEVHFTATNDSTGTDIDFTETHHLELHGDDWYIIETRTTSHQQ |
| 462 | DEDTAREAIKETKKQFVEAFNKGDADRLLELLHPDATVHISNGETITTMEEFKEWVERLASYVEIHLKSVEIEQKDHNEFEVHAHMTFTDKRTKQTYHVTATDRYRFSGDSVKIIESRFHFHQT |
| 463 | PSAEEIIRDLVRRLVEAIDNGDWEALSELYAPDARFTEGPKKQPLDREEFRKWVEEFSKHPSTREIKEIRIQQHGTHTYTVHVHVQLHDQSTGRTFDGTSQLFIVRKDGSWKFKREQDDFTNS |
| 464 | PSMEEAVRDWLRRYFEALNNNDLDALEELFDDDWRFHLAETQKTFDKEEFKEWARTLMSFKSQVQIDEIRIQIYGETEATVEVHVTITRDDTNQTTKFTEEHHFRRKDGSYKLVETHVQRDQA |
| 465 | DNSEIEDWIRKYFAAINHNDLDAIASLYTDDSTYYDAQPRTFHDKEEIKRWYEEFMKRFKDVRFEIKEIRVHGQTVTVHVEVHATHGDRDYTFKVTSHFVFKDGKLKEVRDHMQSTD |
| 466 | PASSEEIKDWIKKYYEAYNNKDVDALVELVDDNAQIHDQHGETLTDKEEFREWVEKWLKEVKDVKFQIDSIDTTDSTVEVHSTVHTTQDGKTVTIHVTETHHFRNGKLTSTHIHSDPDDG |
| 467 | PSQEEIKELDERRIEAFLKQQDADTLAKLMTPDSTFHTYNGETLNDQEEIKKWFKRYFEENFDEMHFQIDHMHIEPNHITVHVTVTFTRNGQTYHMRVTYTLTYRDNRLAHMRIHVDTKHS |
| 468 | PSEEEIREIVKRLMEAFDKGDADAVMSYYHPDATMHVSDGVTFTDLEEIKRWIEQWFKSFDDVKRQIESIEIRGDTVHVHVTVHATQSNGKTITFHVTSTFHFNKDKRIVEERIHIDQRE |
| 469 | MSEEEIRQFLRRFYEAFDKGDVDTFASLFHPGVTIHVWQGITFTSREELREWVERFLRNFKDMQREILSLEVRGDTVEVHVQVHTTHNGQKYTFDVTHHWHFRGHRVTEIRVHVNPT |
| 470 | DSMEEIAKKVVERFAEAFNRKDLDAFAEIFHPGATVHFWEGVTITDQEELKKWFEEFMKRFKDVKVQIEHVDVDQDHVTVHWTMTVHHDDRTIQFHVTTHFRFKDGKLTEVRFHMDWQEHD |
| 471 | TSKEEAKEILKRMYEEFAKERDYDKWVAYFHPDATMHIYQGTTFTTQDEIRKFLKEFLERFKDMKIQIERIEVENGRVTVHYTAHFTHGDETRTYRFTDHFVFKDGKITEERSQIDSL |
| 472 | PSKEEIEEFLRRMFEYWAKTGDVDAYMSLFHPDATFHISDGETFTTPEEVKRWFREFLKHAKDVKIQIERIEIENGRATVHWTMHVTHGDQTHTVRVTTHFQFKDGRITEVHIHRDDT |
| 473 | PSKEEIKEFLKRWFEYFNKTGDADAAASLLHDDVTVHLSNGTTFTDKEEIKEWLRRWLKSAKDVHIQIERIEVQDGRATVHWTVHTTHGDQKYTFRATTHFVFKDGKIVEVRHHYDST |
| 474 | PSKEELIQLVQRWYEEFFKTGDVDKASSFFHDDATIHNASGITFTTKEEFKKFMEEWFKKAEDVKIQIERIEVEGGTVTIHYTVTVTHGDETKHTRFTDHFRFENGKLTEVHSHYDDT |
| 475 | DDREDIERLVRRFIEALNKKDLDTLADLFHDDATMHLYNGITFTDKEEIKQWFEEWMKRFKQVHIELKSMEFRGHTVHVEWTIHATHGDKDITFHAHTTFHVRGKKIIEMRIHVDTDNN |
| 476 | PGEQAIKEWVERWVEAYNKRDADALASLYTDDVTFVHGDQPYQLSREQYKEWVERFLSHFKDSKLDLKSIHIDGDTVTVHMEMHVNTNSQTYTFEITVHLRFKDGKLKEQRDNTDSQS |
| 477 | MSEEQAKELVKRFMEAVDTGDLDALKELFHDDATLHLSDGITFTTKEEIIEWFERWLSQLQDVKRQIESIHVTDDTVTVHWTMHVTHGDQDFTFHGTTHIRFKDGKIVEMREHVDQDDGG |
| 478 | PSWEEIKEWVRRMVEEVFNTGDWEKAKSLLHPDWQFHHSSGTTFHNREEFVEWFQRFLKRFPDTRVDVSHIEITSEDVTVTFHFTFHARHGDQKFTYRVTEHHKFRDGKLVETRVHWHQT |
| 479 | PEEEIREWKRRLFEALDHKDWEKLSELFKSSKDIKMTTQNGRTFDAEEIIEWFRRFVESFADMRHEIKQIDFEGDTVTFHVQVHFTRPDGSTKTIDFTFHDRYDKNGKIVSTNITWDEKD |
| 480 | PEEQIREFVRRLIEAFNKHDIDKLKEIYDSSKDVKFHQDSGETYDKDEFLKQVKEILERWASVHIEIKRIEFDGDTVTVHVQVHLTRPDGQTHTFDVTSHFHFDKDGRVTSEEIRTRKVD |
| 481 | PEEEIKEFFRRLLEALDKKDWEKLKEIYSESKDARITEDSGQTFDKDEFVKMLREFLERWAQTAHQIDRIEFHGDTVTFHVTVHLTHQNGQNVTTHVTSHLHFDKDGRLTHEQIHRDKRD |
| 482 | PMSEEEIKQFVKRAYDALNNHDWETFASLFHPDARVEFNDGTTLTTLEEIKEFIKQLLEKLGRMHIKIDEVHIEKHGDTITVTVHVTVHVHTPDKEITFRATHHWHFTRGRLISLQEHMNQDNK |
| 483 | PDEEEVRRWLREYYDAWNRNDLDALASLLSPDWTLHNGQQSREDFIKWVEEFLKRFKRMRVQIDEIRIERHGDEVHVTVHVTIHFTSSNSTDEVHTTDHHTFRNGKIVETRTHTDQRS |
| 484 | PAEEEIRQWIRRYVEAWNNNDWETIVSLYAPDATFHFGGMSREEFERWVKEWLSRAKDIKIQIDSLEIRQHGDEYTVHVHMTMHITHDNKKTTFRFTSTFHFRNGRLKREHFHSSTES |
| 485 | PDEERAKDWVRRFYEAFNQNDLDAILSLYSPDATFHMNGMSYEDFKRWVEEFLKKFKDVHVQIESIEIRVSGDTVTVTVHVTVHVTLTDGEVTFKATQHFHFKDGKLKEDEMHWRTES |
| 486 | PAKEEVKEWLQRFYEAWDNNDADKLKSLVHPDATFHDGGYDYEQWKEMVEEWLSRVKQSSHHIKEVHIEIHGDEITVTVHVEVHLTHDDRTVTVDVTDHYRFRNGRLVEVRSHRRTHS |
| 487 | MSEEEIREWVKRFFEAINKGDMDKLRELLDDDWRYHDTDRQQTYDRDEFLKMVEEFLKKFPGAQFEIKSIEIRGDTVHVHVQVHMTHDDGSTQTIDITETHHFDSDGKLQRTEVTSDPKD |
| 488 | MSEEEIREIDKQRIEAINNGDMDKVKEIFHPDATFHFNDTQTTYNLEEFIEWVERFLRRFKDVQIEIKSMEVRGDTVTAHSEVHVTHPDGSTQTIRVTYTIHYDKDGKIKRMEINTDPKD |
| 489 | PSREEIEQLDTERIEAFNKGDAEKLKELMHDDAQYHNNDEQQTYDKEEFIEWFEQFMKKFKGVRIQIEELHVHGNRVTAEGTVTFTHDDGSQTHIRFRYTVEYDHNGKIKRVEESTDPSD |
| 490 | ASEEQIEDILRKMYEALNRNDLDAFLSFFHPDATFHVYQGITFTDLEEIKRFFKEFLERMKDVHIEVTRIEFHGDRVTVHYTVHVNHPGETKTYHATDHFQFKNGKLTEVRSTIRQED |
| 491 | TSEEEIREWVKRWAEAFNNNDLDKLVSLFHPDAQIHFYNGQTANSLEEFKKYLERFFRHAKDVRFEIKNIEVHGDTVTVHWTITVNYPGKTVHFHGTTHFRFRNGKLTEVHFHVNQED |
| 492 | PSEEEIKEFLKQLYETIDHRDADAFVSLFHPDATLHISEGITFTTLEEIKRWFEQWLDRVTDVRHDIKRIEIHGDTVTSHVQTHVTHPGQQTTINVTEHHRFENGKLVETHTHWNQER |
| 493 | TSEEEIREIIKTFFEAVDRGDWKKIKDLYAPDATLHHSSGRTFHSLEEIVRWFQQVFSQLKNSSHQITGIEIRGDTATVHVEVHVNNDGRTITYRFTSHFHFSDGKIKEEHVHVHQEG |
| 494 | PSEEEMERAVREVMKRYYRAINEGDLEALKELFHDDARFQSSPMNKEQFIEWVKKANEAGTQLHVHDMEVQIDGDEVTVHVNVTMTVTRGDETRHTTFHETHHLRFTDDGLKIISTRVHFQTHQ |
| 495 | PSEEEQKREIKEFYKREAEAFNKGDLDAWDSLFDDDVKNSSNPADKEEIKEWIKKAFDNNTQMHITHMEIEVNGDTVTVHITVTVHTHRGDRTTTTDYHTTDELRIDSDGWKFVDRQTHFQTHH |
| 496 | MSEEEIKRAVEEFVRREIEAINRGDLEAWKELVDDDARVESEPANKEQMAKRIEELFRAGTQIELKSIEIHVDGDTVTVHVHIQFHTHHGDRTTTVDVTATDVIEIDHDGFRIVSRRFQRHQHT |
| 497 | SDSEDEEAAKEWVRRWAEAFQKGDLDTLSSLYHPGATIHHSDGETYDRDEYLDWLGKYHKKFDTSVTIHEIRVEINGDEIRVHVNMTLTHHHGDQTYHFRVTYTFRFEKKKDGLYLVEQHTHTDDT |
| 498 | DSSEAQEEIKQWFRREFEAMDNKDRDTWASLFHPGSTVHHSNGQTYDREELIERFGSFQSRFDAKHEVKSIEIQQHGDHITVTVHVTVHLTHGDKDKTIDVTYHDRFRKTKDGWKLVERHVHTDEK |
| 499 | SSEEEQKEEIKKWKERFIEAFNKGDVDTIFELVHPDATFYDPNGQSYNIEEFRDMIEKIVSQGYQIRLVSLEIQIVPNPGEVTVHVTVQIHQPGANKTYTAHFTDRYRQKDGQFYLVESHYRRDQEE |
| 500 | SSEEELREKAKQLVERFYEAFNRGDMEAMKRLIHDDARIHHDNGETYDKDQMIDMLKKILDNDVRLEIKSIEIQVSSVPGQVTVTVHVQVHFDKEGKTYKVTHHWVFQVKDGDMKIVNLHEQTHDTS |
| 501 | PSEEELKEQVKEVLERYYEAINRGDMDTVASLFHDDATFRHSNGEQINKEQFVKWLKELFENRTRIQVDEVHIQIDEEPSTVQAQVHVTMHTDGSGKTFHVDESHRLRNQDGEVKFVSTRGHTRDSS |
| 502 | MSEKEQEEAIREVIRRFYEAINRGDMDALEELLHDDWRYHHPSGQTFSKEEFKDMVRKLVENGAKFHIDSLEIQIDPSPGDVTVTVHVTVHHDGKNETYRATDHHHLRLSNGDWKIVETQVRTDNTT |
| 503 | PVSDKEAEEDIREIVRRYVEALNKGDIEAIASLYHDGARIEFTAEQRTVDKEEFKRWVEEWKRQFKDATIQIDSLEVETKDDGTYTVTVNMTITDPSTGHTVHVQSHMHFKAKTKQLYIASEQIHFQSS |
| 504 | MSDDELKEAVKDWLRRFYEALNHGDLDTLKSLFAPDWTFYNVNNPQTYDLDEFIEMVKELLEKFDYRINIEEIRIEIQGRNTVTVHVTFTVQFHHGDETQHYQFHETHHFRFEGDELKLKETRTQTDPT |
| 505 | MSDKELKEAVEEWIRREAEIFNKGDLDAWASLFHPDAQYHDSSDPKTYDYEQMREMFERLQRRFDARMQITEIRIQIFGRNEVRVTVRMEVTFNHGDRQEHYTYHYHFVFRFDGDELQLVEKHTTTQPS |
| 506 | MSDEELKRAVKDWIRRFVEAFNNKDLDALDELLDDDWTYYDSSRKTQFSKEEYRKMVKELMDKFDFRIQIHEIRIQIFGRTTVTVHVHMTVHLTHGDETHTFHVTETHHFTFEGDELKISETRTTTQPS |
| 507 | ASEEEQREAIKEFKTRFIQAVNNGDLDTVRSLVHDDATYHHKGGQSYDKEELLKMIKEMFDNNIQIDVDKIDIQSNGTNSATVTVHVTLHNRTTGQTYETEQHDHYEFRGKRVFLTETHVNTDQT |
| 508 | PSEQEFKEAVKEWKERFIEAVNKGDMDALRELFHDDATMHHSGGQTLDKEEIIQWFAEAFKNQTKWDLKEVHIQIDSSDTVTATFHVETTNQRTGRSFDNTQHDHYRFEGDTVKLVETHTHTHES |
| 509 | PWRKELEEQVREFVRRYIEALNKGDLDALARHFDDDWRFHDARTGKQYSRDEFKKMVEEMFKANVRVQLDSVEIRVNDDGTVTVTVHVTYQDSRTGRTFKVTEHHHFRREDGTMKVVRTQVHFQELGS |
| 510 | PEEKEIEEKIREWVQREIEAWNKGDLETWARLLHDDVRYQNNDTGQEYNKEQMKKMFKEFFDNNIEVQLDEMHVQINPDGSVTVEVHVTFHDRRTGRTFKVTYHLFFRFQDGQLYIVRKRATRREVGS |
| 511 | DRREEVERKIREWIKREAEALNTGDVDAWKSLFTDDFQYTNSDTGRTFDLEEVREMVKKLFDAGVRVQVDSMEIRFKPDGTIEVHVTMTFQDSRTGRTRQAHYTDHVRFENGELKVTSRRATTQPLGT |
| 512 | PEEKEIEEKIRDWLRRWAEAFNNGDLEKLASLYDDDARYHDSRTGRTFDKDQIKKMLEELLRKNVQIEIKEVHIQINPDGTATVEVHATVHNNSTGNTVDVTYTFHFRFEDGELKLKSQQARFHNRGK |
| 513 | PDEEEAKEQLKEWYRREAEAFNKGDVDAWASLFHDDATFRDSRNNQDYDKEEVRRMFEKMSSQGWRVQMDSIEVRIIPNGEVEVTVHFTFTDQRTGRTFKVTAHDRVRKENGTFKFLERQVTTQPTGS |
| 514 | PSEEEIREWVKEFLRKMYEAINRGDVDAVASFYHPDATFEHSNGETYDYEQFREMIKRLFEQNTRVEIDSLEIQIDSSRSVTATVHVTMHTNRGDKTQTFHVTQHYHFEYTNGEWKLKRDEVHTEQRTG |
| 515 | TSEDEQKKKAKEWLERFYEAINRGDLDALRELLDDDWRYHDASRGQTYDREEFLDMVKKWNDNNWQLDIRSIEFQVQPKDHITVTVHVQFTNRTNDRTIDVREHHHFRFKDGSIKLTETHSHFDSG |
| 516 | MDEEELKQIIKEVIERYYDSFNKGDMDKLRELIHPDAQFTNADTGRTFDKEEFLDWAKKATDNNIKIEIHSIRIEVKDKDHVTAEVHVTFKNDKSPQQFDVTNQDFFRFKDGSVKIVEHRTNSDSK |
| 517 | PSEEEIERQVRDWLKKFYEALNKDWREVKKLVDPGVTFHFNNTTFTTQDEIAEWVRQFISNATVQVDSIEIHIHDDGSATAHVTVTVTINGQTFTVHETHHFQVDHNGEIRLVETRTHFDE |
| 518 | PGEEAIREWVRRYIEAMNRRDVDALASLYHEDATMHVSSGQTFHNIEEIREWYQRFFETFKDVKIEVKSIEIRGDTVTVHMDVTVHRGDQQYHFKVTVHFHFKDGKLKEVQINRDPT |
| 519 | PDKEEIKEILRQFYEAIDTGDADKIRELVHEHATMHIYQGRTFTNREEIVEWFERWTSRTRSHHQVDEIHIDDTSKTVEVHVTVTHQETGTTFTFTDEYHFKDGKIVEMRSHEDSN |
| 520 | DDREEIKEFLRRFAEAFNKGDLDTMAELVHPDATVHFSSGETLTTRDEIRKWLEEFFKKNDSKVHLKEIHIDSSSQTVHVHWEVTHDSTQQTFTVTTTFHFQDGRLVEVRFHHDST |
| 521 | PSEEEVRELIRRYYEAFDKGDADALEELLTPDFQYHDSRNPTTFDLEEFKEMVERFFKTFRDMSREIKEIRVDGGHATVHYTVHVTDYRTGRTVTINATDHMRFKDGRIVSIRSTFDDQD |
| 522 | ASEEEAEEFVRKFIQMAFRTGDADAMASMLAPGWTFHDSSGVTYTTREEFKKWFEDMLKRTDEIKVQIDEVRVSDNTITVHVTIHFHHKDDDKTIRFTETHHFRNGQLKETRLHVDNEG |
| 523 | PSDEEIIEEAVRRFYEAFNQRDVDALAEILHPGVTFHSAEGVTLKTKDSIKEWMTQFLQRFKDIKVQIDEIRIHGDTVTVHVTVHVTHDGNTHTYEFTHHWVFKDGRIVEVHEQMRDDR |
| 524 | ASEEQIREWVKRFYELWAKRNDADTAADLMDDDSTLHVWTGETFTDKEEIKEFAKRWLDTFSSFRVEIKSIEIRGNTVTVHVTIHVTNKDTGTTVTIRYTEHHTFENGRLKETRIHADNQQ |
| 525 | DDKREIKEWKERYLQRFFNTRDWRVIRELVHPGVTMHVESQNTTMTDVEEIVRWWKEWLERFPDSKVQVDSIEFDGDTVTVHVTIHTNHKDKTITFTVTYHDKYKDGRLVETHITIRQHR |
| 526 | DKREKLRQIAEEFIKTFTEAVNKNDLDTAVEMYHPDAKYTNASEQRTYDREQFREWFKEYVERVGRMQVQIKHIHVDGDTVTVHVEVHYHHNGKTVTTRVTRHFRIKGDRVTRDEVHTDNQQ |
| 527 | DKREKLKELIREFFERYVEALNKGDWEKVASLYAPDATYWDARRQQQYSREQFIEWVKEFAKRTGDIEVHIHEIRVHGDTVTVHFTVHYHHNGKTVTTRVTRHFTFKGDKIAEDRQHTDEQQ |
| 528 | DKREKLKRIIEEFFERYVKAFNSGDVDAIASMYHPDARFWYSKTQTTYDLEQFREIIERLIKRWGRIQVKIDEIRVHGDTVTVHFTQTWHSNGKTVTARVTRHFTFRGDKIVEDRQHVDDQQ |
| 529 | DKREKLKQLMEEFLERYVRAFNEGDADTVKSMYHPDARFTHSKSQQTYDLEQFAKMFEELARRTGRLQVHITRIEVSGDEVTVHYTVHYHTTSRTTTVNVTSHFRFRDDRITEERVHEDDQQ |
| 530 | PQEEILKELIRRFIETYVEALNKGDVDKLMSLFSPDWKYHLDKTKETFDREEFREWFQRLSSQVRRMQVQIHEIRFDGNTVTVHVTVHIHHDGETVTSRQTEHHTFEGNKIVETHVHADDQR |
| 531 | TSEDQKKAKDILRRFFEAWDKKDLDKLASLFHPDWTNHVSYEQITFTTLEEFKEWVKKWFDRGFDKSRHQIDEIRISSHTVTVHVTIHQTRNGQEFTYHVTEHHRFKDDRITETHQHMNQED |
| 532 | SSEDQQKIKEIKKRMLEAMDNKDADTFASLFHPDAQMHIEQYNITFHNREEIKEFFEQLIKNGFDRVHHQIDEVHISTHTVTWHITAHVTRNGETYTYHFTAHDRYEGDKLTETHYHSRQQD |
| 533 | PEEEHIRTLLERFYRALDEGDLDAIRELFDDDAEFHNKSTGQTYDLEEFLRMIEERLKRNKDSRHEIKEVRITGNHATVHVTVTFHHDGRTHTYHVTHHWHFRDGKIARLQEQSHDAG |
| 534 | PDEEEIKEILERYYEALDKGDWKAIEDLIHDDARYHNASTGQTYDREEFLDMIRKWLSTFQDSRHELKEIRFTGKHVTVHVQVHVNTPGSTQTYDVTHHWRFKDGKIVRIEEHRRDTG |
| 535 | PEEEEIKEFKKRFIEAFDKGDWEAIEELVDDDVTFHFASTGRTYDRDEFIEWIRQWLRHFKDVKRQIHEIRITGGHATFHVTVTVHHDGSTRTYRVTVHDRYRDGKLTETRFHVDDAG |
| 536 | ASEEEIRQALRRFYEAIDKGDLETLAQLFHPGAQIHFSDGVTLHDQEEFKEWMTKFLSQVSDIKHEIEEIRIDGQTVTAHVTVHVNQGDKTYTMKVTEHHHFKDGKITETHFHFDRKNT |
| 537 | TSEEEIREVLKEFYRAIDQGDWETLRSLLHPGARIENSNGIEFTDQEEFIRWVREFFRQVTNVHRQIKRIEIDGDTVTVHVEVHVTQGDRSYTQTVTEEHHFKDGKIVETRIHVDTKQN |
| 538 | PSEEEIKEVLRRYYEAFDNGDWETVRRLFHPGATIHISQGVTITDLDELRRFFEELFKKLTDVKHDIKRIEIHGDTVTVHVTVHVNQGDQTFTIDVQEHHRFKDGKITETRTHIDTKRN |
| 539 | PSEEEIKRIKKRFIEAFNTKDLDELKRLFHPDATMHIWNGQTFTTLDEIKDWFRKFMESVKRFHMQLDRVEIDGETATFHVTVHVHTKDKTVTIRVTVHDRYENGKLIESQFHEDQKDT |
| 540 | SSEEEIRQWVRRYVEAFNNGDLDALKSIFHPDWTYHDASGQTFTTRDEFKKWVKELMEKVKSYRLEIDSMEIRGNTVTVHGTLHVNHDGKTVTIHVTEHHHFRNGKLTETRVHRNTQPT |
| 541 | PSEEEIKRFLKRLYEAFDSGDADALFNLFHDDWTFHSSDGRTFNDREEFREWVERFFKRFGDTAHQIDEIRIDGDTVTVHVTAHFRHPGKTITVHVTDTHRFRNGKLTETRVHVDQQET |
| 542 | PSKEEIKELKERLLEALDKGDMEKLKELVHDDATFHFDNQTFTSKEEFLEWVERFFKSIKDTHREIKEIRIDQDTVTVHVTQHTTHGDKTITVHVTTHDTYTNGKLTESRIHRDTQPT |
| 543 | ASQEEIEEWLRRFYEALNRKDLDAVRELIDEDSTFHISDGSTLTTADEVKEWVKQMVERFNRFRIEVKSIEIRGDTVHVHYQVHFDSNSQTITVDATDTFHFKDGKLTEVHSHWDRKE |
| 544 | MSEEEIKEWLKRFYEAFQRKDLDALRELIDDDSQFHWSNGETIHSADEFKEWVKKFAEDFPDFRVEIKRIEINGDTVTVHVQFHFTNNSQQQTFDVTDHYHFKDGRLVQVHSHINQKD |
| 545 | TSEEQAKELKERLVEAFNKNDMEKLDELVHPGAQFHHNGQQYDKEEYKDWVRRLLERFDVQIEIKSIEIRGNTVTVHLTAHFHTNGKTVTFHFTVHDRYKDNRLTRSEEHTNNAND |
| 546 | MSEEEIKEFKKRLLDAFDNGDMETLDRMFHPGAQFYHNGQQFSKEEYKEMVERMLSRWKFDHQIDSIEINGDTVTVHVTVHRTTNGKTVTVHFTAHDRYTDGQLTESRFHEDNRND |
| 547 | MSEEEIREWLKRYYEAWNNKDLDKIKSLLAPDWTYHHSSGRTFHDPEEFAKWVQELMETFKEFRIDIKEIRIDRSHSRVTVHIEVHWTQDGKHQTTTTTDHHQFDHDGQLKETRVHWHQA |
| 548 | MSEEEIREIDKRRIEAFNHGDLEKLERIVHPDAQFHFSDGETIHNLEEFKEWVERVLRRFPDTKIEVKEIHIDSSTNRVEVHMTVHHTHNGKTTTVDVTYTVRYDHDGKIVEVRETRNQR |
| 549 | MSQEEIKELKKRWIEAWNKKDRDKLRDLYHPDAQFHYSNGRTFHNLEEYLKWFSEFLKKFPRTHLELKSIHIDDSTNRVTVHIQMHLHHKDETRTVDVTQHDRYAPDGKIIESRLHFNPK |
| 550 | PSEEEIREWIKRYYEALDRKDLEALQRLITDDVTFHYSNGTQINTKEEFTEWVERWMKTWAEVHHEIKEIRIEGDTATVHYTVHLRHKNGQTYTIDATDHFHFDKNGKVKRVQSHSNQRD |
| 551 | PSEEEIKEWLERFYDALDRKDREALDRLFHDDVTMHVDEGTTYTTKDEIKEFLERWLETWDSTAHEIKRIEIEGDTVTVHYTTHLHHKSGQTFTQDATDHFEFDKDGRIVRVESHTDQKD |
| 552 | PSEEEIKEIKKRLAEAFNRGDVDTVASLFHDNVTMHTYNGQTFHSKEGIRKWFERFIREFPEIHMQIERIEFNGDEVTFHFTVHATHPDGKTVTIHITVHDRYDKDGKIVESEFRVHQQD |
| 553 | MSDEEIKEWKVKAEFEAVNRNDADAFAELFHDDSTVHFDEVKITFTNKEEIRDWYKKWAERVGQVHLQVDEVRVEDSDTTVRVHMTIHLTHGDKTQTIHVTQTDRYQDNFLKEQHITVRST |
| 554 | PSEEEVKEFVVRAFLEVFNTNDMDKLKSYFHDDATVHFESEQRTLTTKDEIKEWFKQWFERVGDFKVQIDSVRVTDSIITVHVTVTIHFNHGDQTRTVTIHFTDRYVGNKLVERRVRVDQQ |
| 555 | PDEEKAKELLKQFYEAFDKGDWEKLVSLVHPDAQFHFNDGSTIHDQEEFRKWYEEWKSRFPEVHRQIHHMRIEDDDATVHVTVTLTFTHNGQEYHVEVHETHRFRGDKIVETHVHENEQK |
| 556 | SGREATKEWKKRFVEALNQGDLDAIMRLFHEDATLHVSKGETYTDKSEIREWFERWLKSLKDVKIQIDSIEIRGNTVTVHMTMHVNRGDQTYTFHITTHDHYKDGKLTETHFHEDSRD |
| 557 | TSEEQIRETLKRFYDAFNRKDLDALREIVAPGVTFHFSKGITVTDREEFLDWVKKFLEKVKQMHIQIHSIEIRQNEDDTITVTVHVTVTLHHDNKTITMTVTDHYRFKDGKLVEVHSNIDQEDS |
| 558 | ASEEEIKEFVRRFVEGFNNRDADKIASLYTDGATLHVSEGRTFNSRDEIRKWAKEFLDKVKQVHIEIKSIEIQQDEDKQVHVHVHIEVHLHHDNKTTTVHITSTMTFRDGQLVEEHIHVDSEDR |
| 559 | TSEEEIKEFIRQFLEAFNKKDLDLFASLFDDGAQLHISNGVTFNSQEEIKKFLKELLDAYEELHMHLTSVEIRQNEDETVTVTVHWEVHVRQNNKDITMTITTHFTFKDGKLKRVKIDIDQEPK |
| 560 | PSEEEIREFVKRFLEALNKRDLDKVRELFTPGVTLHINNGVTYTTQDEITKFFKEFLDSFKDIKIQVTEIRIEQKDDSTVTVTVHWEVHAHHDNKTVTLHMTTHFHFKDGKLVEVRIHIDSEDT |
| 561 | PSEEEIKRLIKRFAEAFDNGDMEKLASFYDDDATMHVSSGYTATTREEIKEWFERFFKNFPNTRHEIKSIEIRGDTVTVHVTVTVHHPGKTITIHVTRHITFDKDKKIQRDQIHLDERD |
| 562 | PSEEELKEFLEKFYEALDKGDLDTLRELLHPDVTFHFRDGETITTMEEFEEWFKKLQSRFKDSHHEIESIEFSDGTVTVHYTAHFHHKDETVTVHATDHYEFDHDGKVKRVKSDYDERR |
| 563 | PSEEEIREFKKRLVELFDNRDLEALAQLYHDDATFHYADGVTVTTKEEFKEWVKRVLDRFKNARHKIDRIEVSDGTATFHITAHFTHDGETVTIHATQHDHYRKDGRLTRSEDNSEERR |
| 564 | PSQEEIREILRQMYEAFNNNDLDAIASYFHPDATYHIWNGRTITTLEEFKEWLEEVMKKFKDLRIEIDSIHVSDGTATVHVTFHVHHDNETVTIHATETHHFDHNGKIVETHNNADEHR |
| 565 | PSEEEIKQWKRRFLEALDRNDRDELKSLFHPDATMHLANGQTFTNLEEILKWLKERMEKFQNTAHQIEEIRVSDGTATVHVTVHVHHKDKTITFHFTQHDRYDKDGKLVETHDNTNQHD |
| 566 | PSEEEIREMLKRFYEALNHNDLDTIEELLHPDATFHHASGTTFTTLEEIKEWVTRMLRRFKDLRIQIHEIRVSDGTVTVHVTIHVHHDNKTVTIHATHHWHLDKDGKVTEVHDNSDQRD |
| 567 | PSEEEIKEWIRRYMEALDRNDVDAVASLYDDDATMHIYNGQTFTTKEEIREFYERWMKSVRDTAHEVKKIDVSDGTVTVHVEVHLHHDGETVTIHATVHLRFDKDGKLKELRDNAESRR |
| 568 | ASEEQIKEWLRQWYEAFNTGNWEEAIKRLVDKDWTYHYNNQTFTDLDEVLKWFERMFKSGAHDIKRQVDEIRIDGDTVTSHVTQHVTSNGEHYTYHITEHHRFEGDKITETRVHEHST |
| 569 | MSEEQIKEILRKFYEAMDTGNVEDAIREVFHDDAQMHVNNQTFTSKEEIVEFFKRQWSSGNDEVHREIHSIEIRGDTVTVHVTVHFHSKGETQTYHVTHHWVFKDDRVTEVRQHTNST |
| 570 | TSEEQIKRLVQKFLEAFDTGNVEDAIREIYHPDAQLHVDNQTMHNLEEIVEFFKRLFASGQKEVHRQVDRIEIDGDTVHVHVTVHFHHDGETQTYHQTSTFHFKDDKLTEEHIHTNST |
| 571 | AHEEEIREWIKRWVEAFNKGDADTLAELYDEDSTLHDSNGQTFTNKDEIKKWAEEFFKRADDTKVEIKSIHIDGDTVTVHVTVHVNHNGQKYTFHFTSHLRFKDGKLKEQHIRTYQT |
| 572 | THEEEIRQWVRRYAEAFNKGDMDTLKSLYSDDSTYHNSNGITATTKEEIVKFIKEWLEKVGDSRFQIDSIEIRGDTVTVHGTVTAHTNGQQYHQTITRHFEFKDGQLKRDEARIHQQ |
| 573 | TSEEQLKELLRRLFEAFDKGDWETIAKLLHPGATMHIWDGYTATDLEEIIEWVRRWFKSVKRVHREIKEIRIDGDTVTVHWQMHVHHDNRTITRDGTTHFHFENGKIKEVRFHVDQRD |
| 574 | PDEEKIRQWVQRFFEEVDKTGDWRAFASYYHPDATVHYSEGKTFTTLEELARWLATWVRNVPDFRVEIEEIRIDGKTVTVHVTIHVHHKDKTTTVRQTSHFHFRGDKLTREHVHRNNSD |
| 575 | PSKEEIEEFLRRFYEEIFKTKDPDAFMSYFHDDATYHYNGRTFKTKEEIKDWFEKYMSSFERLHVQVDEIRIQDGHATVHVTVTAHQGHETIHARYTHHWEFRGNRVASLREHSDQQD |
| 576 | MSQEEIKEFLRQLYERLWNTKNADVFLEYVHDDATYHNNGQTYKDKEEIKEFFQRWFAHFPELHVQIEEIRIENGRATVHVTIHATQGDEDVTFHQTHHWVFKDKRITEVRVHTDTQR |
| 577 | SSQEEIEEILRRFFEEVWNTNDREAVKSYFHPGATYTDARTNTTYPADAEELAEWFSEMFERIKDLHVQIKEIRVSDNTVTIHWTVHTNHGDQTHTFHATTTFHFKDGKIVEVRTNMNQTD |
| 578 | ASEEEIRELIKRFFELFDRGDLDALASLMHPDWQFHFGDETAHNLEEFKDWVREWLSTYGESHHDIKRIEIDGNTVTVHVQVHFHSPGGKTITVDVTEHHHFVKDGKITETRVHYDQKE |
| 579 | PSEEQIRELVRRMIEAFNKRDLDALFELYHPDATFHYNNRTFNSREEIKEWFKRFFEKFGEVHVQIEEIRIHGKTVTVHVTVTVHHPGGKTVHIRVTSHFHVHDDGKITEERVHSDQRE |
| 580 | PSEEEIREFLRRFYEAIDKGDLDTLKELFHPDARMHINNRTFDSLDEIKEWFERMLSRFKDTAHQIDRIEIDGNTVTVHVTVHFTHDGGKHVTVHVTHHWHFVKDGKVTRLQVHENQQD |
| 581 | PSEEEIRQIKRRFIEALNKGDLDALEELFHPDARFEWGDQPFDSKDEIKEWFKRWMESVGRYEIRITHMEVEGKTATVHVQVHVHHPGGKTTTIDFRAHDHYHDNGKITETRITWDTKE |
| 582 | VSEEEVKEWVKRFFEAFQKRDLDTLAELLTDEWQYHHYSGNRTETLTTKDEMREWFKRFLSSFDVKIDEIEIHIHDDGTVTVHVHITFRSGDKQFTMTVTETHHFKDGQIKETHQHVNIQDH |
| 583 | ASEEEIKEWVRRFIEAFEKRDFETLKELLTEDWTMHSQSGNTSETATTLEEFEKWVREFLSKIDLQFDELHIHVHDDGTVTVHMTVTVTSGDQQFTVHVTEHHHFRNGKITETHITFNYQPH |
| 584 | ASEEEIKEILRQFYEAFQKGDLDKLLELMDKDATLHFHQGNETYTLTTKDEFREWFREFKEKFDIQFDELEIRVESNGTVTVHVKVTVRSGDKTYHMDVTETHHFKDGKITETRTHIRVQPT |
| 585 | PSEEEIREWKKRFFEALQKGDLDALLEIVDPDVQFHFYEGNRTYTATTKDEFKEFMRQAFEKFRFQIDEIEIHIDDSGHVTVHVTITVDSGDQKFTVHVTQHDRYENGKLTESREHRNWQPN |
| 586 | PSEEEIREWKRRFIQEFWNTRDYHAVERFFHDDAEMHVYRGETFTTKEEIVRWFRQVLSQFPEAHVQIDSIEIRGDTVTVHVTFHLTRPDGKTVTYHITYHDHYKDGKLTHTRFHVDTKET |
| 587 | PSEEEIREFLKRWYEEFVNEKDADKAASMIHPDATFHSDNTNLEQWKERVERTFRHTIDEIHVEIKSMEVRGNRITVHVTIHVHHKNGQTYTFDATHHWVFRNGKITHVNEHTRQHP |
| 588 | PDQEKIKDIKTKFFEAFDRKDLDTMVSLFHPGATVHFSDGITHHNLEEFKEYIKRLLDTFKETAHHMKRMHINGDTVEVHVEAHFKSDNQPRTFRVTVHDRYKDDRITESHFHWDEEN |
| 589 | ASEEELKEILKRWYEEVWNSGDWNAAASYIHDDATMHIWNGQTFHNRDEITEWIRRFLSSMKDVRFEIKRIEVHGDTVTLHGQLHVNHDDRTQTIRYTHHWTFQDGRIVRVEFHNDTGSS |
| 590 | ASEEEIRSWAQRYYEEADNSRDAEAIASLLHPDAQVHFARYQRQYDREEFREWLERWFRSVGDAQREIESIEVRGNTVTVHVTMHVTHNGKNVTIRATHHWHFRNGKLVEVRVREHTHES |
| 591 | PMDRSQIEEWVRRFIEALNHKDMDKLRELYHPDATLRYSGDHGLDAVMEWLKQWLEKFNNTRIEIKSIHVHGDTVTVHVTVHVRRGDEDQTFQFTSHFRFESNNRLVSEQIHTQPVD |
| 592 | PTDQSQIRDLIKKFIESFNNKDVDLVRELVHPDARLDASQSDGLDEIVEWFKRALEQFKNAQIQIHSIHIHGDTAHVHWTMHTHHGDQTYTYHGTTTFHFVKDNKITSIRIHVRQKD |
| 593 | TSEEEIRELLKEFYRALDEGDLDKARSIIHPDATMHISEGTTFTTQDEITKWVEEWIKKFSNVQRHIHGMEINGDTVTVHSRVTFTHNGKNKTVDVTDHYRFKDGKITNFTSHFNDT |
| 594 | PSKEEVEEWLRRFYTAWNNKDIDALAELLHDDWTYHNNQEKVTLTTKEEFRKWVKEFLDKAKEVHIQIDSIEIEVRGDEVHATVHVTIHVHHDDRTTTIHATDHHRFRNGKLIETHSTLETRE |
| 595 | PSKEEIEQWIRQYYDAFNKGDLDRLAELVHPDVTFHFYEEQITLTTLDEFREWLERFMRTFKEVHVEIHSIEIRVDGNEIEVTVNYTMHVHHDDRTITVHGQDHFRFRNGKLVEVRSRLETRE |
| 596 | ASEEEIREWVKRFFDAFNNKDLEALQRLVHDDVRMHVAKEQITFTTKEEITEWVKEFMKRFKRVHIQIESMRIETHGNEYTVHVHWTMHVHHDDRTVTLHGTTTFHFRNGKLVEVTFHIEERE |
| 597 | PSQEEVRQLVERMVEAFNNKDVEALKSLYDDDATYHDSSSNETLHTKEEFERWVRQWMSTFKDTRMQIDEMHIEVRGNEVTVHVHVTVHVNHDDKTVTLHITSTIRVRNGKIVEEHTHVDERE |
| 598 | ASEEEIRELVKRMIDAFNHKDLDTLASLYHDDATMHVSDGYTANDKEEIKEWFERVMRTFPDHRLEIKSIEIDGQTVHVHVQMHTTHDNKTVTMHVTSTFHFTDGKLIEERIHVDNRD |
| 599 | PDEEQIREFVKREVEIWNNRDLEKWKELFDPDVKWTNAATGQTYDREELIEMIKRILETFKQIQIEIKDLHISDDSYKVTVHVTVHFHRGDRTTTIDYTHHFHFRNGRLVRKQTHEDSK |
| 600 | PDEEIAREVAKRYYEAWDKGDWEALEELVHDDATFHEAETGNTYDKEEWIERYKSFLSQFPRIQRQIHDMHVSDDSNTVTVHGTVHFHRGDRTHTIRFTHHWHFRNGKIARMEEHVDTG |
| 601 | PEQEEIKEWIRQFLDQMFRALNQGDRDTIKSLYSDDATMHIYQGITFTTKDEILEWYERISSRFPRIHWEIKRIEVSDGTATVHVRVTFTHPTGEQRTYQITSHFHFDKDGKLTEEHIHTQPVPS |
| 602 | PKQEELEEIVRQFIERFVRALNNGDLDAVASLYHPDATMHIWEGITFTTPEEIREWIKRWAERFPEIHVQITEIRVSDGKVTVHVTVTFTHPSGKRHTYQVTRHFRFNKDRQLVEDRIHMQPVPN |
| 603 | PSQEEIKETKKRFVELFNRGDVEAAVRELFDDDSEFTHSETNTTKTASREEVIERFKRWFDSWPEVHIQIDSMEITSGDATVHVHVTIHATRNGKTTTFHVTVTDHYKDGKLKRSQEDTGST |
| 604 | DEREEIKEWIKRFFEAFDKHDLDKLISLLHDDATVHFSSHNVTLTDKEEFKEFIERMLSRFKDSRHEIESIEFRGDTVTVHWTAEFHHGDQTYTVHGTTHIRFKDGRVIEVRFHVDETG |
| 605 | DEREEIEKFVRRLFEAFDKNDWEEIARLLHDDATIHFASEQITLTTKEEIKEWLKEWIKKVKDTAHQIDSIEFRGDTATFHWQVHVTHGDKTQTNDATTHFRFKDGRLIEVRVHIDSTD |
| 606 | DLREEIKELVERWFEAFNRKDLEALAELVHDDARIHFASEQVTMTTREEYKKWLEEWFKRVEEIHFQIDEIRFHGQTVTVHWTAHVTRGDKTVTYHGTTHFVVQDGKIVEIRVHVDQTD |
| 607 | PEREEIKKWVERFFEALNKKDLEALAELFHDHATVHFSMTQITAHTRDEIKKWFEEFFKKAEEVHVQIKEIRFHGDTVTVHWEMHVTHGDQPYTFEGTTHFRFKDGRLVEVRFHVRQTN |
| 608 | DDREAIKEFKERLLEAIDKGDLDTFISLLHEDVTFHFASEQITLTTKEEIKDWFEKWLKKVKQTAHELHSVEFHGDTATFHFTVHVNHDTKTVTIHATSHDRYKDGRLIETRIHENTTE |
| 609 | SSEEEAKEAARELVERFYEAFNKGDLDLLKELMHPDATIHFSEGRTYHDLDEFIEAVKEFLKRNIKLNITSLHAEVDGDRVTVHVTVTMKDEVHHTWHFQRDHDGDFKVVEVREHTTG |
| 610 | PPEDEEKIRQWKKEFLDALNKGDADRLLEIIHPGSTFTFNGQTFTTKDEFKEWVERMKRRDTKFQLDELHIEFDKDHITVRVHVTIHTNDNSQPYTVHVTARDHYRKINGQWYLVRTEFHFHDSR |
| 611 | PREDEEHIREWIKREVEAFNKGDWEAWLRLVHPGSTFTYNGQTYTTKDELREWFEHAQKRNTQIHIKEIRIQFTQDHATVEVHFQMTVNDNSQQYHVEVTQTDHFRKINGQWYLIRREVHSDDKR |
| 612 | PEEDEEHIRQWYRREAEALNKNDLDAWASLFHPGSTVHFDGRTFTDQEELREFFKELASRNFRIHIESLEIHIDKDHATATVHFTVHWNTTSQPYTVKYHATDHFRKKDGKWYITERHVHTDDKR |
| 613 | PEEDQEKIKEYKKRLIEAFNKKDVDALAELVAPGATFHFNGQTFTTKEEFKEWVKQMASNDFQIHIDSMEIQFTKDTITVHVHYTVTFHESSQTYTVHATATDHYQKRDGRLYLVETRSQFHDTR |
| 614 | PPEDEEKIRQIVEEEFEAFNRGDLDRWLELWHPGSTLHVNGQTFTSKDELKEWMRNLLRNNVQMEIKEIRIEFSDDHATVEVHFTMTMNRDSQQYHVDATATIHLRKVNGDWKILEKHVQYNDKR |
| 615 | PPEDQEAVKEVVERFLEALNKGDADAVASLFHPGAEFHWNGQTFTTKDEIRKWVKEFNDRRIRVEVKSIEIHVDENHATVHVHWTMTVNDSSQPYDVDVHTTFHLQKRNGQFYILEVHFHVDDKR |
| 616 | TPASEEQIKEIIKRLAEAFNKGDMDAIKSLYDDDATMHIWNGQTFTSKDEIKRWFTELHKNDIEVHVQVVEIRVHGKTVHVTANFEFRDRRTGRTVRITRHITIRVTDNGELRIVEDQFHSHND |
| 617 | PSQEQVKEWANRFYEAFNKKDLDALYSLYHDDATFRDARTQQDYDRDEFREMVRQMLSRDIQLHWEIKEIQISDNHATVTVEVHMTDQTTGKTVTATQHFEFRRDHDGRVYLLRDEVHYQE |
| 618 | ISEEQIRETIKREFEAFNRGDLEAWASLFHDDATLRDARTNQDYDKEEMREMIERMLSNNVQLHVEIKEIRVTGNHATVHVEVHVTDSRTGTTVTFTTTIHFRLDHNGQVYIVEKRLHFQS |
| 619 | PSQEEVKEILRQFYEAINKGDVDAVASFYHDDATIHFSQTNQDYDRDEFREWVERMIRANVQIHFEIKRIEVSDNEATVTVEVTVHDSRTGTQVHFTQHIRFVKDHDGRIKIVEDRIHFNT |
| 620 | PSEEQVRELKKRLVDAFNRGDMETFDRLVHPDATFEDASQGRTYDREEFKKMLEEMWKAGIRLEFHIEEIEFSDNEATVHVRFTMTDSRTGRHIDARATDHYRLDHDGQLYLVRTQFHWQT |
| 621 | PSEEEIREIIRRLYEAINNGNWEEVARLFHDDWRYHNAKTQTTYDLEEWRRWVERFHKNNIQIEVEIKEIQFSDNEATAHVRVTVHDRRTGQTFHATDTHFFRRDHDGRIFIIRTQVHYQD |
| 622 | PSQEEIRQFVNRFYTAINRKDADEVAELFHPDGTFTFASTQRTYSLEEFIEWVRQAASNDFRFEWKIDEIQISDNEATVHVTVTVHDSRTGTTYQVHETHFFRKDHDGRIKIVRTEVTHQS |
| 623 | PSWEEAVKEWVKREVHAFNSGDMDAWLSLFHDDVTMHDSNGQTFNDLDEMKKWAEELWRQGAEVQIDSIEIKEITETEITVRVEITFRKTNTTVTFHITFRLDHDGSWKVVEKHVRTDN |
| 624 | PSDEEAVREWIRRFYDAFNKGDADALKSLYDPDAQMHISNGRTFNSRDSIKRWFTELFKSGVEIQIESIQVDEVTEKEVHVTVHFTMKQHNITVTQHITFRKDDNGQWRVFRDEIRFHN |
| 625 | PSAEEAAKELIRRFVEAFNKGDADAAKELYDDDAQMHIWNGQTFNSKDEIKKWFEEFHKAGFSIRILSIQVDEVTETEIHVTVHIQVDQYNIRFTSHVTVRRDHDGRWKIFEERIQNNN |
| 626 | PSDEEAIKEWVEREIDAYNKGDLDAWASLFTDDVTVHDANGQQFNSKEELKRWVKEMIEQGREIQVDSIRIDEITEKQVTVTVHITDKSQNITFTMHLRFEKQDDGSWRVIEKRMRNDS |
| 627 | PSEEEIRQVVRRFFEAFAKRDMDTLRDLYHDDATFHYNGRTFKDKEEILEWFKRLLDNIQRMKIDVEVHVDGKTVTVHSTVHRTHNGQDRTQHVTSHFHLDDDGKIVEERVHSNTQE |
| 628 | PSEEEIREAVKRFYEAFNKRDADALMRLMHPDATFTYNGRTFKTPEEIKDWFEKVLKNIEELHVEIHIEVRGDTVTVHYQVHFTHNGQTYTVDATDHFHFDKNGKIKRIQSHTRQTE |
| 629 | PSEEEIREFKKRFFEIVANGDMDAFKELVHPDSTFHWNGTTYKDKEEVAKMFAEFASTLQDAKFDIEIHVDGDTVEVHITVHMTRNGQTFTFHITVHDRYDKNGQLVESRFHENQQR |
| 630 | PSEEEIRETVKRWFEAFQNRDLDALADLYHDDATVTIDGQTFKDRSEIKEWAERVLKSIQRLKWDTEIHVDGDTVTVHSTFHTTHNGQDFTFHVTVHLRLDKNGKIVEQHTHTNEQK |
| 631 | PSEEEIREILRQFYEAFAKGDWKKLSEIVHDDATMHVDGRTFKTKEEIVRWFREVWKKMSRAKFDVEIHVDGDTATVHVTVHTTHNGQDYTFHVTDHYHFHKNGKITRIQSHTNQER |
| 632 | DLEEQVKEWLRQFYEALDKNDLDTAMRLLHPDATFTVDGQTFKTKDEIRKWFEEQLRSMRDIKREVSIYSITEREVTVRYTVHVNHPSGQTFTIDAQDHFRFDKDGRITEVRSHRDQKD |
| 633 | DFKEIAKEFLKRLYEAFDRGDVDAFAELIAPGWTMTVNGQQFDTPEEVRTFIERVLKSLKHSRREVQVIEATDRTVTVESTMHTTHDNGQDFTFHAHDTHRFDKDNRLVETRSHTDPKE |
| 634 | SSQEEIKEVLRRFYEALNKGDWKKIADLIHPDATFHHSNGQTYDYEQFVEMIKKYASDSKTRLEIEEMHIHGDTATVHVTIHQQRDTSRHTTHVTHHWHLKDGKVTELREHTNNT |
| 635 | TDESQIRDWVRRYIEILNNGDIDKLKELFDEDWTYHDIARQQTYNLEQFLEMVAQFMSRASTASLEIKRIEIGGDTATVHVTDHTKDKTFHYTEHHHFKDGKLTETRQQTDDG |
| 636 | TDESQIREWVKRWIEAFNRRDVDAIASLYHDDARITFEENNQTYDKEEFREWVERFMRTFPDFQLELKEVRIGGDTVHVHITFHHNNRTVHVTSTFHFKDGRLTEQRIRTDST |
| 637 | TSEEEIKDIKKKLVEAFNKGDADTFAELVHPDATFHFAQGITLTSKESVRKWFEEWVERNKDYRIEIDEIRFDGDTVTVHLTVHLGDTTVKVTTHDRYKDGKLTESRSHFQPT |
| 638 | SESEEAIRDWIRRWVEAFNKRDVDALASLYHDDATVHFTQGETFTTKEELRRFIERYLRTFKDVKMDVEEIRVDGHRVTVHMTVTVHHDNSTQTYHYTVTLEFNGDKLQEQHVHIHHS |
| 639 | MSEEEIKEWKRRMVEAFNNGDLDALADLFDEDSTFEVNKGEQFTDKEEIKEWFERLLKTFSDSQITIDEIRIDGNTVTVHSTQHTPQYNQTFRVTTHDTYKDGKLVSSRFHRDEG |
| 640 | DEEEDREAVKEWVHRYVEALNKKDRDALQELYTKDDSTFHVWNGQTLTDYEEIVKWLTEFASTVESVELDSIEVHVDGDTVTVHVHITFKSSNQTFTRTFHFEKTKDGFKLKEDRVQRHS |
| 641 | PEEKRKEEIKELVERMVEAFNKKDIEKLKSVYTKDDSTIHIWNGQTLTTQEEIERWIKEFLKTAEHIEIKSLRIEIHGDRVTVQVHLTLRSNNVTYTSTLHFELTKDGWKLVEEHIQNDT |
| 642 | PSDEEQIRELVRRLYTALNTDPDKFAELIHDDATFHISNGQTFTTKDEVKDWVEKFASNTSIEIKSIEVQIYKDGRVTVTVHFTVHTRTSTVDVTDHYHFQKTGSEWKLLEVRSHYDNR |
| 643 | PSEEAEKAVRELIEREIEALNKGDWEAWVRIIHMEDITVHINGQTFKNPEEIIRWFREFISNVQLQIDSIEIHQNDNGEVTVTVHITIHTKDKTIHVTFHLHFRKENGSWKLTSKQAHFDNKE |
| 644 | NDPNDVEAVQEIIRREIEALNKGDMDAWASLLDKDNSTLHFNGTTFETMDEMKDFMAKYVSNAQIRITSIEIHVNPNGTVTVHVHITIHHKDKTVHVTSTLHMRKKDGSWQIAEKHTHEDQKD |
| 645 | PHDQEEVEEFLRRLYEAFNKGDIDKLRELFHPDWQYHDAATQRTYDLEEFLERVEKLTKDIHIEIKSIHIETRGDEIHVTVHVTVHNPSTKTTVTVTDHHRFERGSEQWYLVETHSQSHNE |
| 646 | PSDQEAVEEMIRRMFDAMNKGDLDKLESLLDEDWTYHLEATNRTYDKDEFLEWVEKFMSHSHLEIKEIRIEIRGDTATVTVHVTVHDKRTGTTVNVTEHHHFNKKGEEWRILETRAHFNNT |
| 647 | PSDEEAIRETKKRLIEAMNKGDWETLKKLFHPDAQFHLSAYQRTYDADEFIEWVRKFMKDWRITLHSMEIRQDGDEWHVTVHVQMQDRRTGTSYSVTAHDRYVRNGEEWKILESRFHFNQS |
| 648 | PSDEEAIRELKKRFIEAINKNDMDTLKKLFHPDATFHFAAHQRTYDLDQFLKWVAERASHLHFQLDSIEIEIRGDQVHVTAHVTVHDDRTGRTFHVTSHDRYRKDGDEWKVIESQFHFNET |
| 649 | MSDEEIIRDLLRRLFEAMDKGDMDTLRELYAPDATFHIEERNRTFDLEEFLEFFAKRTKDFQRHIESMEIQQHGDDFTITVHVTVHNRSTGKTYKYTSHFHVRKSSSQWKFKEEHLQTRET |
| 650 | AHKEQQEKIKEWAKRFYEAINRKDPDAVKSLLHPDWKYHDSRTNTTYDLDEFKEIVEELAKNDVRLEVRSIEITASGDELTATVHVHFHNNSTKVTYTVTDHHRFREENGRIKIVETHSTMQSQDQ |
| 651 | VDESAEEEIRRWLRRFYEAINRGDLEAVYRLLHPDWTVEFSSEPREFNLDEFKEWVEKMIRAGFKFEVKSIEIHQDGDTATVTVHVDLHNDQTKDTFKVTEHHHFALRNGTWYLVRTQIHLQPVNS |
| 652 | TDPEDEKKIRDIKRRFVEAFNKGDWETIRRLFHPDAQFHFSSEPTTFNLDEFIRWVKEMIKRNVELRLDETHIEQHGDTIHVTSHLTFHFQEEQVTYRVTAHDVYQKQNGDWKIVEVHIHWDNSNQ |
| 653 | AHKEDQEEIKRWLKEFYEAIDNGDADAVYSLYHPDARIDFASEPRTFNIDEFREWVERLASQGTAHELKSIEIHKSGNTIHVTVHVTTHIKSTGNTYHVTQHFQFELINGQWFLTKDEIHINNENK |
| 654 | TDPSDQEAVRQIVRRFYEAFNNKDLDAIASLYHPDATFHFAEDPTDYDLDQFREWVKKFLDADIRIQIHHIEVESSGDEITVTVHVTMHNQRTGNTYHVTQHMHLRKKDGEWKVLRDEIHRDNANK |
| 655 | PDPSAQEAITEWLKRWVEAVDKGDADAVASLYHPDATFHDSRNPRDYDLEEFRRWVERFARNDVQRELKSVEIHQDGDRFTVHVHFTLHNRRTGDTFHVTATFFFEKHNGQFYIVRQEVTTQQENS |
| 656 | PDPSAEERIRQILNRFYEAMNRRDRDTLRELIHPDATFHDSNGQRYDKEEFLERFERIPWYRIHIDDMHIEQHGDEATVTVHVTFHIKTDSTSYTVTHHWRFVRFGDDWKIVELHVHTHNNS |
| 657 | PNPEDIEAAKQIVQRLYEALNRGDWEEFKSLIHPDATFHDTNGQSYDLDEFIEMLRKRDITRFQIDSVEVRQEGDTVKVTVHGTVHRSSDPKTFTVTHHWVFVRHGDEWYVVEVHEHTHNRS |
| 658 | PEDEEAIKEWLRRYFEAMNKHDVDKLLSLYHPDAQYTDTSRNQTFDYEQMKEMYESQSGQQTHIHVTHIEIQKHGDEVTVTVHVHITAHTKDRTRHIDVTYHFRFRRDGDEWKVVHVQETRRQT |
| 659 | PEDKEQIKEFKKRFLEALDKGDWQKVKEMMHPDAQYTNTSTQTTYDLDQLVEMIKSNSGKETHRQVHEIHIQQESDDFTVTVHVTVHTHTPTETRTYHVTYHDRYRKKDNRWYIVEVHETTHQT |
| 660 | MDSHILEEQARQIVRRFAEAFNNKDWEKLASLYHPDATFEFEETGTEYDLEEFIRWFRRLAETADIEIHFSIDEIEIRGDEATVHVTFHLTDRRTGRTTTYHSTFHVRYQDSEVKILRERITTRQT |
| 661 | MSEEELKEAVKDVIRRYVEAFNNGDLDKIASLYHPDASYYDSNGQEYDKEQLIEMLEKLFRQNFEMHFQIKEIRVDGDTVTIHVEFHVRDYSRQLTFTVHRTFHLTFTDSKVYITRDEVHTENNE |
| 662 | MSEKEQKEAIEETKRQFAEAFNKGDWKRLAELLHPDVRFHDSNGQQYDLEQFIRRVQKLFSQDVKMEFSIKEIRFDGDHAEVHVEFTVKHSQTGTTRWFDQTDFYQFEDSEVKIIEVRVRTVNGE |
| 663 | MDEKEMTEQIKEVVQREVEAFNNGDADTWASLFHPDARFHHSNGQTYDLEQVKEMIKELVKNNVRIEFSIKEIRFDGDEAEVHVEFHYHDARTGTTQTFDQTIRMRFEDSQVKIVSKRVHTKNGS |
| 664 | MSEEEQREAVKDMVRRWVEAWNNGDWEKLASLYHDDATYTDSNGQNYNKEQYIEMVKKQASQNLKLEFSIKEIRVDGDTITIHVEFHITDDRTGTTVTFTSTFHLTFYDSQVKITEQRVHTHNGQ |
| 665 | SEAEEAVRDMIRRWVEAWNTKDVDKLSELYHPDATFHHQNNQTYNKEDFRRRFEQLASSDFKIEVKSIEIQIDNKDEVTVTVHFTVTYEDTQTTTNITSTFFLRRENGRWKIVEERESRNQQQ |
| 666 | PNLEEAVRQVLREYFEAINNGDVDRVMSLYADDARWHTNNGETYDKEDLKRWYEEFASIPFHIEVKSIHIQINDDTHVTVTVHVQITHPETGRTTDVTATFHMQFQNGSVKIKEVHTHHNDHS |
| 667 | SSAEEDIRQVMRRYFEALNKRDADAVASLLDDDWTYHNSNGETYDKEQFREMVERYASIRFKIQITSMEIQINDKDSATVHVHATVTEEDTGRTTDITETHHLVRKNGSWKIIETHVHRNDRQ |
| 668 | SEMQEAVREWLKRYYELFNQRDWEKVASLYDDDARFHHNNGETYNKEDYERRLQSLASLDFTLQVHEIRVQIIDDTQATATVHVTYTNHHTGETVRITQHFFFRVENGQWKIKRDEEHRNRQE |
| 669 | SEMEEAIREVMKQLYTAFNTGDAELVDRLLHDDWEYHHQSGNTYDKEDFIKMFEEMASIPFRIQIDEMHIQIIDDTRATVEVHATITFESTGTTQHFTEEHHLRRKDGSFKVVETRVHTNDQQ |
| 670 | SDDEDAAEELARRFYESFNKRDWEKFARLVHDDATFTQNNGQTYDKEQLIEMFKSMASSRFHVQIDSLEVRIIDDTRVQVTVHVTVTFEDTGTTTHATHHWFFVKENGEWYLVHLHERRNDRQ |
| 671 | SEAEEAIRDVIRRLVEAFNNRDAEKVKDLYHPDATVHHNNGETYDKEQFIERFKELASFNFQIQILSQEIHIHNDTEATVHVQVQITEDDTGRTTDVHSTFHLRVFNGQWKIVEEHINRNDQS |
| 672 | SELQEKIKEFKQRMVEAFNNGDLDKISELVHPDVTFHHSNGQTYDREQFIKMVERMLSSRFHIQIKSMEIRIEDDTHVTVTVHLEVHFRDTGTTVEVTAHDHYRFENGSLKLVEVQIHRRDRS |
| 673 | PHDEEEIREWVKRFIEALNRGDLETLDRMLHPDWRFHNNKTGRTFSREEFKEMVERMKSNNTRVELKELHVEIKDGHVTVTVHLQFHTNHNGQTKTVDVTEHHHFRRSNGEWKLVETHATFHEH |
| 674 | PSDEEEIREWVRRFVEALNKGDMDKLKSMLHPDWRYVDDRTGQTYDLEEFAEMVKKLKSHGMRIEIKSLEVEVKDGTATVTVTVQVHTTHNGQQYTTTFHERHHFEKRNGNWYLIRTEVTVDHH |
| 675 | PSDQEKIKEWLRQFFEAFNRGDMDKLKEMLHPDWRYHNSNEGRTYDLDEFKEMMRQMFSNGIRLEVKSIEIHIHNGTATVHVEVDAHQTHNGQNKTVKFHETHHFDKKDGRWFLIRTEVTTHET |
| 676 | PSDEEDVRDIVRRLIEAFNKGDLDALRELYHPDARFHNDKTGQTYDLDEFIEMVEKLASNGTQIELKSLEVEVKDGHVTVHVHVQFHTTHNGQTKTVDVTRTIHFRRSNGEWKIIRDKATFNER |
| 677 | DEEEIKKEIKKLIERFVEAMNRGDMDAIDSIYDDDATYTHASGQTYGKEAFKRWVKEFLEKVEHIQVRSLEIEIRGDTATVHVHMEVTFKEDNKTYHFTSTFFFRKKNSTWYLSSERVTTQQDDG |
| 678 | AGKEAEEAIRDIIRREAEALNNKDYDTWKSLFHPGAQFHISATGQTYDLDEFVELMRKVFDPKRMEIKSIEIQTDGDEATVHVHFQVTHRKHNTTVTVTATIHVRRSNGQWYIVEKHIHFQPT |
| 679 | AGEEAEEAVRQWLRRFYEAINNKDMDKMKSLYTPGSTIWISDTGTSYDVDEFIEFFEKFFTAKRLEIKDMHIEVSGNTATVTVHVQVHLESTQQTYNVTQHFHFRREDGTWRLTEDHIHVQPT |
| 680 | AGDELKEAVKEWLERFYEALNKNDMDALRELFHPGATIYDSSTGTSYDIEEFLERFEKIFKMTRIEIKSIEIHTSGDTATVTVHVEVHFSRSNQTYRFDHTWHFERKDGTVRLVELRERMHST |
| 681 | SGEEAEEWVREWVKRFFEALNNKDMDALKKLFHPGAQFHDASTGTTYDLDEFLEMLEKIYQFYRIEVKSLEIEFDGDTVTVHVHWTGTREQSNQTYDATTTFVFERKDGTWRIVEVHIHFQPT |
| 682 | PEDQEEIKELKKRFLEAFDKGDMDTLRSLIHPGAQFHDSTTGNTYDKEEFLQRVAEFTSNVEIHRQVDRTEIQQHGDEYKVTTHVTVHFTHNTKTQTQHVTSHDRYRKDGDEWKLLESRFHFQQT |
| 683 | PHPEDETKIREIKKRIAEAMNRGDMDAIKELFDDDVTFTHESGQDFDLEEFLDWVKKLTSTADRIEVEIKRIEQHGDHVTVHVTVTVTNSSTGTTTDFHATDHYQKKDGQFRITRTHFTTRDT |
| 684 | TDPDAQEAVREWIKQFVEAFNNNDMEKLKSLYAEDATIEHSGGQRFDYEEFIKRVERRIRNSTFHLEFEIKHIQETTDEVTVHVQFHMHEEDTGRTFTYHSTFHFRKTDGGYKLKSEQIHRHQT |
| 685 | DEKQEELVRQALTREIEAFNTNDMDKWASLFAEDARFHNYTGQTFDLEEVKEMIKQMLSNTRLRFELHIISIEFRGDTVTVHTTLHVTDESTGRTTTIHQTIFLKIDDDDVRIKEKHVQEDST |
| 686 | PVDPTDEEAIRQWVRRFMEALNNNDLDKIRSLYAPDAQYHNASTQRTYNLEQFLEYLEKFLPGTHFEVKSLRIELRGDEITVEVHVTVTVHHKDKTVDIDVTRHFHFRRENGSYKLVRDQAHWDSKEK |
| 687 | PSMKELVEEWVRRFVEAINKNDMDALKRLYTPSDSRVHFDNRTFETPDEIKEWFRQHAENAKLEIKSIEIHTSDNEVTVHVHVTVTNDRTGKTVDVTRTLRFRIEDGSVKIKEDRVHRHDT |
| 688 | SDDEAREAVKRLLRRYYEAMDNGDWETLLRLLDDDWRYHDESGETITTREQFRERVERQAQHPTHRQIDSIEIHQDGDQVHVTVHVTQHHEETGTTVKVTDHHTFTRKNGQWRITRTQSHRDPRQS |
| 689 | DEEKEAKEWAEEWITRYYDLLDKGDWEAVLSLYDDDATIHVYNGVTYTSKESIEEFIRRWISESQNARHEIKRIEVEVRNGTVHVTVHVQVHNSSTGQTFDVTQHFEFRKEGDNFKLKRDEIHRRDTT |
| 690 | DEEDESREAIKEIVHREAEAFNKGDWETWLSLFHDDATIHIQDGETLTTKEQIRRWFEEVRKQAQFSSIEIKSIHIEVHNGTYTVTVHFQVTDSRTKRTYDFTQHIVFVRHGDEWKIVEKHIHRRDTS |
| 691 | PEEEEDKEQIKEWVKRWVEAMDKGDFDTLRDLYHDDATIHIFNGETVTTKEQLEEWLRRVLSQSQFSKREIKSIHVEIHNGTATVHVHGEVTDSRTGKTFKVTSTFHFEKHGDRWYLVSQHLTMHDTS |
| 692 | PVNEEEAKEQIRDWVRRYIEAINHGDLEAIASLYHDDVHWWARNQNKEELKRWYERFLRRFPDVRIEIKDLHIEIRNGTATVHVHVQVHFPGQNQTYDVTTTFFFEFQNGQIRLVEVRTDNQPT |
| 693 | PINDEEVEEALRQLYRRELEAFQKGDIDTWASLFHPDATFEGRKLDYEQMVEWFERILRTFPTMKVELKDMHIEVKDGEFRVEVHVQFHVEGTNRTFNVTFHDFIRVRNGEFQIVNRQMHQNDT |
| 694 | PINEEEQREQIKEWVERFVRAFNSGDLETLDSLYHDDATFDGTGTSKEEFKRWIEEFLRRFPDARMQVDHLEIRFKDGEATVEVHFTVHVPGKNITFHFTSTFFFKFENGQMKLTNEEVTRDTS |
| 695 | PSPEDEKTIREWVRRFIEAFNNKDLDTLVSLFDEDWTFHDANGQTFTTLDEFREWMERVLRTFQDAKMQLDDLEIRFDKDHATVTVHITIHDSDSNTTYHVTEHHHFRKDTSGWKLLETHVHTDQQPT |
| 696 | ASEQEIREAVKEFKRRLVEAINKGDMDTIRELFDSTDSEMHIWQGRTYHDQDEIAKWFEEFRKKFEVEIHITNIEIHIRNNTEVTVHVHFHVTDRRTGKTFTYHATDHYRFEGDTIKLKESRFTRDEHR |
| 697 | AHPEQQEKIRQIIQRYFEAMNNKDADKLISLIHDDWTYHDSSGRTFHNKEEFKEWVEEFLSKFDVRFEVKSIEIRLDDSTQITVTVHVDVTHTGTNQTFKVTEHHHFRLKDGDWKMVRTEVRTDG |
| 698 | PEEEEIKEIIKELKKRLVEAFNKGDLKTLRDIFHPDATFHDSNGETLTSLDEFIEWVKEWLRRFDTNLQITEIRIEIKSKDEATATVHITVHFEDGTTYTFTFHDRYRRHGDEIKIVESEIRTNNTG |
| 699 | PREEELKEQVEEIIRREFEAFDKGDWETWLSLFHPDATLHDSDGTTFTTREELRRWFESLRKRTDTAHQIDEIRFEIKSKDTITVEVHVTVHTSEGKTYTFRAEIHLTRHGDEVYIIEKRLHTHNTG |
| 700 | PKEEELKEQVKEVLRRFYEAFNKGDVDTLAELVHPHATFHFSNGETIHSRDEFREWFKEFKKRLDFRIEIKEIRFEIKDETNITVTVHVQFHRQNGQTFQVTEHHHLRRHGDEVKIIETEFRFNNTG |
| 701 | DDDQQAVKKLKKRFVEAFNKDPDAVAKLWHDDSQMHDSNGSTFNSQEEFKEWVTRLARHAQIHVDSIEVHSRPDGTIEVHVHMTIHRENDTYTVTATDVYRKKDGSYQIVESRFRVHQT |
| 702 | PSDEEAIREVIRRFYEAFQTDIDDLASLYHDDATMHLWNGRTFTTKEEIKEWFERLARTTDVHIDSIEVQTNPDGSVTATVHVTTHITNSTFHVTQHIHFRVQDGDWKIIRDHIHEQPS |
| 703 | MSEEQIKEWVKRYFEAYDKGDWETLVRLVDDDWQFHQNSGETIHSREQFREWVKEFLERFQDTAHQIDDLEIRGNTVTVHVTVHVNMNGQTFTIHVTEHHRFEGNKLKETHQHTNQQD |
| 704 | PDPRAIEQIKEWLKRFYTIINTGDWEKLAEILDEDWTYHDSSGQTYHDLEEFAEWVKEFNKQNFHMEIKSIEFRQDSRPGYYHVTVHVTVTQEGTGRKFDTTDHHTFRFQDGSIQLVSTQVHWRET |
| 705 | PEKELQEKAKEIKRQLVEAFNKGDWELVARLVHPDATFHHSDGRTFTTLEEFIEWVKQWSSQNWEIEIKSLEARVLPDEREVTVTVHYEVRNQTDPKTFRATTHDRYVFKDGQVYLIESRTQWHPL |
| 706 | DEPEAQEEIKEIVKQLLEILDTGDWEKLSSYYHEDATFYYNGRTFHTREEFTEWVRQFASNQSHHQIHSIEIHKDGDEYEVHVHVTVHFRRDPKTFKVTSTFRFRQTKDGLKLLEERVHRDDGQ |
| 707 | MSEEEMREALKEWFQRWAEAFNRGDMDALKSLYDKDAQMHISGQTFDNPDEIKEWFERLFRQNVKIEIKSLEIRMTPDSTTATVTVHAQMHNETDSTTWHFTAHFEFTFEGDTLKLKRQQTHIHQDDK |
| 708 | PSEKEIEEAIRELLKRFYEAINKGDWEKVARLVDKDWTFHYNGRTFTSWEEFVEWVKEFFKQKFRIQIDSIEIEIDSDQNNATVHVHLTVHNEDNPVTRHTTDTHHIRYEGDSFKFVETRVQMHQDDT |
| 709 | TSTKEAEEAIREFKKRYVEAFNNGDMEKLERLIHPDATMHVSGQTFTSRDEIKEWLEEMIRQQWQMHVDSLEIRQEPDPTHFTVHVHVTFHLDRNPTTVHATQTDHYRLKDDSFRIIRMQVHFHQDDT |
| 710 | MSEKEQEEAIREWKKRFVDAVNTGDMDKIRELVHPDARFEVDGQEFNNIDEFLEFIKQFFREQWRIHIKSLRIEFDEDSREVTVEVHLEMRNERNPTTVEATFEDHYRFKDDTLKLIETRVQRHQKDT |
| 711 | MSEEEMIEAVRQWLRRFYEAIDRKDLDALARLFAPDATMHIAREQREFDWEEIVRWFERFLKTFPRTAHQIDEQEFHIHGDTITVHVRVTVHFQDTGTTVEVRDTYFFEFENGELKLRRRESTFHQK |
| 712 | MDRSEQEEQIRQFKQRWAEAWNKGDLDTILSLLHPDVTFHFASYQRTYSYEEYREFFERFQKRFPNARLEIKRMEIEFHGNEVTVHVHFTVTYPDTNTTVDYTTTDRYRFENGELRLLESRTQAHQN |
| 713 | DEEEDREEIKEWKERFLEAIDKNDMDKLRELLHPDATWYNGKHPQESTLEEVLEWLRQFWETFKDTAHQLDSLEIRFSDNTATVHAHVTVHFHHNGQRYTYRVTATDHYVKRGDEWKLVRSEEDRRQS |
| 714 | TSEEVKEHITEVVRREIEALNNGDMDTWRSLFHPDATVTFKSEQRTYHLDQVVEMIKEFLERYPDTHMEIKDLHIEQDGNTVTVHVHVTIHVRHKDGTITIHVTATIRFRLKDGDWQIVHKTVERHQEDH |
| 715 | ASEEDQREVREIIEREVEAFNKRDLDAWMSLFHPDARMTVAAHQQTYNWEQMRRWFKTFLDQYPNTHMEIKDLHIDQSGDEITAEVHVTLHITNKDGQVTIHVTATIHFRKINGQWFIIRKEVHMRQEDT |
| 716 | PSKEDQEKIKEIIQRELEALDNKDLDAWFELFHPDAQVTDSRTGTTYSAEELREMVEEWLKKAKDTAHELKSLEIEQDGDTYHVTVHVTAHVHHKDGTVTYHFTAHLTFEKRNGQFYIISKHVTTRREET |
| 717 | ASKEDQEDIRELINRFFEAINRNDVDAVKSYLHPDATFHFASEQQTYDLEQFRKWLEEFMSHFKDTRIEIKSMEIQQSGNEATVHVHWTLHAHTKDGTFTIHGTTTLRLRKENGKWKILEVRISIDRQKT |
| 718 | ASEEDKEEIRQIKQRLFELFDNNDADALRSLFHPDATFEFEESQTKYDLDQFKEWVKQFFRTFQDIQHEIKSMEIEQHGNEIHVTVHVTLHITFPNGHVTIHATYHDRYRLINGNWYIVETTVTFRQEDS |
| 719 | THEEAERQARETVRREFEALNHRDIDDWASLVHDDAEFHYESSPQTYNKDEFREWVERQLKSWSSFRIEIKSLHVEQRGDEYTVHVHVTVHFDETKTTTHFDFTIHMRRKDGEVYILEKHIRTHHE |
| 720 | TDPEQEEKIKEWLRQFYEAWNRRDLERLAELLAPDWTYHSNDGNTTYDKDQFKEMVEEFMRKFSRFRLEIKEVHFEQRGDHVTVHVHAQVHNPQTGTTTHTTDTHHFRFENGQLRLTHTHSTTYHS |
| 721 | THKEAYEEIKEIVEALAHAFQTRDLEKLKSYYTDDAQITFSDGNQTYNKEEFARIVERRLRELSDFRVHLTSLEVEQRGDEFTVHVRFQMHNNSTGETYEFRSTIHIRRENGRWKILSEKITTHKT |
| 722 | TDPSAREKIKEWLERFYTAWQEGDLDKLESLLHPDAKFHSGNGNQTYNKEEYKEMVERFMKSVRSYRVQIDSIEVHQDGDEFHVTIHVTFHNDDTGTTVRVTNHDRFRFKDGDLKLVEHRSTHHHE |
| 723 | PSDEEAAREIVKRFAEAFNTDPDAVAELIHPDATVHIYNGTTLTTKEEIKEWFTRLISNTRIEIKSIEVHKNPNGTVTVRVEWTMHRKDQTYRGTTTFFIEKRDSEWYILEVRIHVQPT |
| 724 | GDPSDEEEIREILKRFYEAMDKGDMDLIRSLLHPDVTMHLPNGQTFTNLEEVIEWIERFHRNFPHHRSLDSIEIEIRGNTATVTVHVTIHFPGENQTFHVTHTWFFRKKDDTWRIVEMREHRDDKG |
| 725 | MDKDDKEEVKQFIERYYEAYNKGDIDALAELVHDDAQFHYNNGETLNSKDDFREWVTQLLSKFPSQVHIHSIEFRASGDEITVTVHVTVHHDGSGQTVHVTDHYIFRKEGDRWKIVQVHSHRDTRD |
| 726 | PSKETEEALREWIRQYIRAINERDVDAIHSLYHDDSTLTNQSEGRTYDAEEIREMYERFLKTFPRTTLELKDLHIEQRGDTATVTVHITIRFWGEGRHVDVTYHFHFRRSDGPFKLVHVQVRADDKHS |
| 727 | ASKEDQEEIREILEREFRIWNNHDLEAWEELLDKDVTVQYSDTGTRYSADEVKEMIEEILRRFPDARIQIDDMEIRQDGDEYTVHVTYTVTFTGTGQNITFHATFFFRKSDGPWKVISKQVRVDRRTQ |
| 728 | PSDKAEEDVRQVVRRLVEAFNNHDLDALDEIYAEDVTWHDSRTGQQYSKDEFRERVERIMKTFPSMHIEVKDLHIEQRGDEVTVTVHYTQTFTGTGRQSNITSHFHLRQKDGEWKIVREHVTTDDSQT |
| 729 | PSKEDEERIREWVRRFYDAFNKHDFDKIAELFHPDSTYHDSRTGTTYDYEEFLEMVERFLRTFPDFRMEIESLRIEVRGDHYTVEVHFTVTFSGHGDNVRVTDTYFFRKKDGPFKLVEMRSNIDNVRT |
| 730 | AGEEDREAIKDLLRRFYEAIQKNDMDKLRELLHPDARFHDARTGQTYDKEEFLQRVQEFWERFQDINVEIKSIEIDADGDTITVHVHVQFHVNTPTRTQTFNVTETHRIEKHSNDYKIVETHIHTNQT |
| 731 | SSEEEMREKIKDVKTKFIEAMNKNDLEALAELVHPHITLNSANLHTRDEFKKWMKEWLEKFSDAQIQVDEMHIQINSKDTATVTVHVTVHNKSTGVTFKFTAHDVYRFEDGSVKIVSSQIHTDNGS |
| 732 | SSEEEMKEAIKEFKKRLAEAFNNNDLDKIRELFAPDVTLNSANAKNLDQFVEWVERWLSDWKDFNIQITSIEIRIDSKDTATVHVTFQVTDARHNVTFTFHATDVYVFKDGSVKIKSVEIHTDTRS |
| 733 | MSEKEMEDQIREVLKRFYEALDKHDLDTLDELLHPDWQLDSQNLTTREEVQRWFTKWLSEFKDSNHQIDEIRIEIKSKDTATAHVHVTVHDNSTKQTFHVTETHFMVFKDGSVKIVRTRVHRDSGS |
| 734 | MSEEEMKEAIKQVIERFYEAFDRGDMETIARLVDPHVTNRSRGIKNREELIEHLKRLVEEFKDVNHEIKEVRIQIDSKDTATATFHVQQHDSRTNTTYRVTDHYFLEFKDGTVKIVSVQSHTDTGS |
| 735 | MSEEEMERAIRETIKRFYDALQNNDRDKLRKLVSDDITLRSSGATTKEEFIKWFEEWLKTFKDFHVHIESLHIQINSSTSATVTVHVTFHNSSTKVTYHITDHYFVRFKDGSIKITHVQSHTDSQS |
| 736 | PDPRDEEAVRDMVRRMYTALNNKDADAVRELVHPDSQFHIYNGRTFNNAEEFTEWVKEWLKNDARVEIKSIEVRQDDDTRITVHVTVEIHYKHGPHTFTFHHTWFFVKINGSWKIKEVREQRDSS |
| 737 | PEEKEIEEAIRRLLERYYRAMNNGDHDALKKMLHDDWQMHIDGQTYNSKEEFEEWLRRMLSQGVRLEIKSIEIHVKDGTATVHVHVQFHNSSRPQTFTVTETHHFRRINGQWYLIRTEIHRDSN |
| 738 | PEEEEAKEKIKEFKHRVIEAINTGDWEAIARLFHPDAQMEVNGQQYDDLEEIIRWIQRLHSQNVQIEIDSIEIETRNGQYHVTVHVTVHRRNNPQTYTVTFHDVYRFKDGSLKVIRTEVRTDSN |
| 739 | PEEEEAKRAAKEILERFFEAMNKGDWEALERLFHPDAQMHVDGQTFNSQEEIRRWFERWFSADVQIQIKSIEFEIKNGTITVRVTWDAHNSRKPQTFTFHTTVHLEQQNGSFKITRMEIHTDDN |
| 740 | MSEKEMEEAIRDWLRRWFEAWNKKDMDTLKELYAPDATFQHSNGRTFRTLEEIMEWFKQMLDQDVKVTLHSVEFRMHDETHATVTVHMTFTNDQTNTDVKATAHFHFQFDSTSVKLKRQQVHEDST |
| 741 | YSEEEAKELIKEVIKREFELLDSGDLDAWLSLIHPDATFHDSNGITFTTLEEIAEWVKQMFEQNWRHRITSIEIRVDSKDEVTVHVHVKVQQESTGRTRDVTFTDRFRFDKDSVKIIERQVHYDST |
| 742 | TDESDIREWLKRFYESINKGDLDAIEELFHPDATMHLSNGRTFTTLEEIKEWFERLAKRFDIKVEIKEIRIDGQTVTVHVTVTRTHRSGKTQHMTVTDHYHFEGKKLVEMRSHFDTKDQT |
| 743 | AHEEEIRELLRRYYDAWNKKDVDALAEIFHPDATFHHSNGQTFTNREEFREWAERFMKRFDMQIEIKEIRVDGQEATVHVTMHFTHSDGSKQTARVTEHHRFRGKRIVETHQHIDMRDVT |
| 744 | ADESDAREWIKRFFEAFDKGDLDALAELVHPDAEIHVPEGITFTTKDEFKEWVERLFKRFEFHHEIKEIRADGNTVTVHWTLHVTHSNGETYTATGTTHLRFEGKKLVEMHIHVDMKKVT |
| 745 | MDEDELKEAVERTMRRFYKAFDEGDADTAASLVHDDWTYHQSNGETLTTREELKQWVEEWFKQFPDTRREIDSIEIRVGDETEVTVTAHFTVHFTHSNQTRHTTDTHRFQFQNGSVKVIETRSHENG |
| 746 | MSEQEAREDIKDIIRRFIEAINKGDMDKVRELYHPGATLHIDSGVTYTTLDEIIKWVAELASNNLRIEIKDMRIEQNGDRATATVHVKVTNESDKRTVDVTSHIHFERTNNGFKIVEEHVNTQN |
| 747 | YSEKEAREQIEEIKRRIIDALNKGDMDAIKSYFHPGATMHIWNGQTFTDLDEIKRFFKEMHDNNFKFQLDEIHIEFKGDEATVTVHVTVHNDSNPQTYTVTAHDRYVYTNGQWYLVESRFHMQD |
| 748 | MSEQEIREDIEDIIRKFYEAINKGDMDKLRSLFHPGATFHDANGTTFHDLEEIVRWLKQIFDQGWELEVKSLEIEIRGDTVTVRVEVTMRNRSDKQTYEVHDTYFFHRSENGYKIVRVESRIQD |
| 749 | PGEEEIKEAIKEFLRRFYEAFNKGDLDALMRLVHPGVTFTQDNGRTFKTMEELREYFQKLIENNFRLHIHEIRIEIKDGTATVTVHVTIQQQTTGKTVRVDHHWFFRVEGNRVKLVEVRSRTDDDN |
| 750 | DKEKKTREQIEDFKRKEVEAINRKDLDKIKEIIKDAQYTNSDTNTTYDADEFVEMVEEWARRFPNAEIHIDSIEIHIDPKGDHATVTVHVTIHYKDTGETRHVTYHDHYRQEGDELKLVESRFTTTNG |
| 751 | PDEEEQREQIKQWIERFYEAMDRGDWQTLKELIGDATFHNTDTQQTFSADEFIERVRQFQSQFPNVHRTMVSIEIRFDPRGNHITVHVTVEVHIGETKQTHRFDNTDFFRLEGSQWKLVHHRFTTRGG |
| 752 | DTEKMEQDIRELIRRFFEAFNNKDADAMASLLHDDAQIHFEEDKKTYDKEQFREWVERVLRRWPDTKVQIDDLHIEITKDHVTVEVHWTVTFNRNGKTHHYHGTTTFFFRLKDGQWRIVELRFHLESRD |
| 753 | DGGEAQEQIKELVERFYEAFNRKDVDKAMSLVHPDATFHFEEDPKTFDKEEFREWLERFIRTFPSHQLDIDSIEIHIDKDHATVHVHVTVHVNKDGKTYTYHFEETHHFRLVNGQWYLVETHIRYEERG |
| 754 | DSGKAEEDIRQIKRRFIEALNRRDVDAFMELVHPDAQFHFSSDPKTYDKEQYREWLERFFRTFPRVHIEIKDMEIRVDKDHVTVTVHVQVHVTQNGKHETYHFTYHDHYRLKDGTWQFIESRVTTDQTD |
| 755 | DSGEMQEAAKEVVKRLVEIFNRNDADAFASLIAPDWRYYDSRDPKTYSIEEFREMVKEFASRFPDTKVQIKDMHAEVTKDHVHVTVHVEVHLNQNGKTTTTHVTEHHTLRLENGSWKVVSTRTTMETRE |
| 756 | DSGEMQSAARELINRFYEALNNKDWKKIADLIHDDFTFEDSRDPKTYSREEFIEWVQRWMKQFPDARLQIDSQEVRVDKDHVTVTVHVTMHTNHNGSTITFHITHHWFFRLENGQWYIVRLRETMESRH |
| 757 | PSEEDERAIREIKKQLVEALNNGDADRFASYYHPDATVHTSEGRTFTTREEIKEWAKQLFSNNIRIEIKSIHIDRDGDRATVQVHVQFHNSNTGTTVDFTAEDHYQKKDGDFRIVEVHIHRDNGG |
| 758 | PSEEDQRAAKDIKRRLVDALNKGDADTFASLFHPDARIHFSDGTTLTSRDEIREWVKKFFSQGWHIEIKSIHVDQDGDEFTVTVHVHLHQERTGRTFTVTAHDRYRVKDGEWYIIESRFHFDNGG |
| 759 | PSEEDEKEIRDIIRREVEALNKGDADAWASLFHPDATYHLYQGRTFTTREELKEWIERFTSQGVHIEIKSIHITQDGDRLTVEVHVTYTNDSTGQTFHMTFTDHFQLQNGEWKIVERHVHVDSGG |
| 760 | PSEEDQRAIKEILKRLLEALNKGDADALLSLFHDDWTLHINNGETYTTKDEFREWVERFFSQNFEVQLDSVEIRQDGSTFTVHAHFTVHNRNTGQTFRVTETHHFQKKDGQFYIIETHTTHDSGG |
| 761 | PSKEDEEAIRDLLKKFYDALNNNDLDKLKELLHPDWTYHSSDGRTFTTKEEFAKWVEDLWSQNFKFDIDEIRITQDGDHFTVHVHVTMHDSRTGRTVHATDTHFFRKKDGQFYLVETRTHWDNGG |
| 762 | PSEEQKEKIKQWYERELDAFNKGDADAWASLFAPDATMHLWNGETFHDREELKRWFEQMISNDIKIQLDSVEIHVDGDEVTVHVHFTFHNDRTGQTFHVDATDRFRFENGQLKLIERHVRRDNGG |
| 763 | PSKEDEEAIREILKQLAEAFNKGDADAFASYFHPDATFFDHDGTQHNSREEIKEAVKKLFSQQFRVQLDSVHIDLDGDHFTATAHWTFHQERTGRTFTVTTHVRFRKKDGQWYIVEFRMHLDTGG |
| 764 | PSEEDERQIREFDRQRLEAFDKGDADKVKELFHPDARIHFYDGRTITNAEELAEWVKQFASNDVKRIIHGQRIEQDGDEFHVTGHFSLTDSRTGKTVRFTYHITYRKKDGTWKIIRMEVRVDEGG |
| 765 | PDESQIRDFKRKEVEAFNNGDMDTLRSLYDEDARVHTSQEQVTYTTRDEIVKHFKELLEKFPDMRIEIKEIHVDQDHATVHVQVHTTQDGKPVTFRVTVHDRYKDGKLKETQFDIDNHPD |
| 766 | PDESEIRDWLRKYYEAIDNGDWETVASLFHDDATVHYSKYQVTLTTKEEITRFIRRFFSRFRNSRHEIEEIRFDQDTVEVHYTATYHQDGKTTHRRATDTFHFKDGRLVEVRSHWDDVPD |
| 767 | DKEDEAREAVKEWVRRFVEAINNKDVDAIASLYAPDATMHINGQTFNDWEEIRKWFSQWASRADLQIHVDEQEIHITDNTVTVHVRMTIRNKSDPTDYEYHSTFHFTKEGNSWKLKEEHVHSRQL |
| 768 | DEDEEIQRAVKEIIKRLYDAFNNKDLDALRELITPDWQNHTNGQTFTDLEEVVEWIERYLKTFDTRLQIDSMEVETSDNSATVHVHVTAHHPEDPKTFTITETHHIEKNGSQWRLVETHVQSHEQ |
| 769 | DEEEMRQKVKEMVERHIEAFNKGDLDKLESLYHPGAQFHDSRDPKTYDLEQYKEMVKELFKANVKMQLDSIEIRINGSTEATVTVHVTVTNDSTGTTYRATRHIRFRFKDGGLKIIEDRATFREQKS |
| 770 | DEREMEEAARQTIEREIRAFNRGDLDTWASLFHPGAQFDDSRDPKTYDLEQMKEMIKELIKANFRLELKSLEVRIVGRTEATITVHVTITQDQTKRTYQATFHFHIRFKDGGWKIVKKEARYREQKS |
| 771 | PEEELKKIAKEAVEREFEAFNKKDMDTWRSLIHPGAQYHDSRDPKTYDKEQLTEMVKELLKADFQLEIKSITIEIEGRTHVTVHVHFHMTQPQTGRTYTVTTTIRFEVRNGSVKIVEKRTTTRQQDS |
| 772 | DEEEAKKEIERIVRAFYEAFNKGDLEAAASYLDDDWTLHVDRGRTITTKEEMREYLKQLLDNGIQLHIESIEVRVHPDKTHITVHVRVQVTNRSTGSTVTADDTHHFRRENGDFKMVETHITHREE |
| 773 | DDKELEDKIREVLERLYRALNNGDMDTFMSFFDDDWTFHDSSGQTFTTKDEFRRWVERFLKAGWKIEVKSIEIHIHDNGEEVTVTVEVHIHNDQTGQQYTIHDHHFIRFENGSLKFVETRVQYRNE |
| 774 | DEEEIRQRIEEIIRRLYEAINKGDLDKLRELIHPDATFHFSNGQTITNIDEFLDWVKKFTESGFKMQIHSIEIRIHPNKDEATGTVHFTLQNDRTGTHYRVTDHYFLRRKDGDWKVVRVQSNIHSE |
| 775 | PEEEQKKAAEEAIRRLYEAFNKGDVDAMLSLFDDDWTFHDASGQTYTDREEFKRWVERLLSNNIHLQIRSIEARIDKDGSTVHVTVHAEMTNSTTGVTYTVTEHHTLRFENGSVYMVETHIHIHSE |
| 776 | PLSEKELKEQVKELVKRYYDALNTGDLDTLLSLLDDDWRMHQKTQTWNSKEEFKDYVTKFKSNTNAEIQIRSMEIQIHGDTATVRVHVDVTIRNTGTTITYRDTHHITAGSNQAKITETKSDEDN |
| 777 | PETSPEDREEIKRWVERYAEAFNKGDVEALASLFDDDWTFHDSSTGTTLTTKEEFKEWVKKLLSNDVKVEIKSIEIRTVPNGTIQVHVHVTYHSKDTTVTVHETHHFQKEGDTWKIKETQVHFHQE |
| 778 | NPTSEEDKKQIKEIDQRRIEALNNGDRDALEELFHDDSTMHDESTGQDFTTKDEIKKWYSEVFDGDFKMQLDHLEIQSTDNGTVEVEGHATLHTKNSTVHVRYTVRYQKRGDTWYIIHVRYNFNQS |
| 779 | SQTSPEDQKEIKDWIRRFFEAINKGDADAVASIFDDDWTYHNKSTGQTYTTRDEFKKWVEELFSNDAKIEIKRLEIQSNDDGTATVHVHYTMHVKDSTFTVTEQHHFEKEGDRWKIKETHTQIDQN |
| 780 | SSEEETKEAVRQWKKRFVEAFNRGDADELRELFSPDVQMHFSNGRTFHNREEIVQFFTKQTQNGTKLTLKHMEIQIHSENRVTVTAHFEVHDDRDNKTYDMTTHDRYELRGDDWYLVETHIHIHQQ |
| 781 | YSEEEIKEIVKDVVRRWAEAFNRGDWETLLDLYHDDATMHISNGQTFNDPDEIARYLTSLASQDRKMDITHIEIQIESENHATVHVHFEVHDSQDNKTYTFTSTFFIVFRGDGWKIVEQRIHTHQT |
| 782 | PEDQEDIETWIRRFYTAFQHNDLDKLSELLTDDWTFHYVRDDERQTYDRDQFREWVERIAKTFKDIRVQLDSLRIEIRGDHATVEVHFTATFHQDGKTHTVHTTDTHHFRRTNGGWQIKETQFNLEQRSD |
| 783 | DEEEAREQIKELVERWAEAFNKGDLDALAELLTDATVHYSYDKKTLTTKESIKEYYERVFRTFPGSQIELESIEIHFKDGTAEVHVHWTQTIPQTKEHYTGTTTFHVEFHGDDLKIREVRITVDSN |
| 784 | DEEEAEKEIRELKHRFVEAFNKGDLDALLEMLHPDATYHDSSGRTFTTPEQFEEWMRRFLSFKVQIHIDSIEIHFSGDTATVHVHLTVHRDGTGQTYKYTATDHYVRFGDTWKIVRVQVHTQPT |
| 785 | DEEEIKSQVEEFDRQRLESFDKGDWEAILRMFHPDATFHDHNGETLTSWEDFREWVKKFASNQTHHEIKEIRIEVRGNEVTVHVHVSVRYSKTNQQYKMTYTIRYRLEGDEWKIVEFRAHLQPT |
| 786 | DEEEQRRQVKEWVHREIEALQKKDIDTWLSLFHDDFTLHISNGRTFTTKEQLEEFFRELASRDFRVEVKRIEIEVNGNEVTVTVHFTVHHDKENQTVDVTAHIRIRFEGKELKVTEKRMHFQPT |
| 787 | DEEEMKRQARDWLRRWFEAFNKKDVDKILSLYDDDATFHDGNGRTFNSRESIEEWIRQFLSRDARIEVESIEFRVDGDHITVHVHFTVHFSHTGKTVRFTATFHFRREGDELKLLRQQIHSQDT |
| 788 | ADPSAQEAVKQLVRRWVEAFNKGDLDALKELYDDDAQIHISNGQTFNDKEEYARWVEQLSQSAQLEIHGIEVRPTSKDYYTVHVNITMHVKDTGTTYHFTATFFVKRHDWKIVEQRTHFEQRG |
| 789 | LDPSQEEQARQLARRFYDAFDKGDADKLKSLVDENWRLHVSEGRTFQSKEEVAEWVQKFADGTAHKMDEIRVQLDSDKDITVTVHVTVHNKKTGTTVTVTDTHHVKADDPKIAETHMHYNQHG |
| 790 | LDPSQEEIIKELVERMVEAINKGDMEKLKELYHDDATFHAYNGQTFHDKEEFLDWVRKFASDAKLHITGIEVRPDSKDHITVTVHVEVRFDSTGTTVRFTSHFVIRNNDWKIQEEHLHRDNTG |
| 791 | TDPSQQEAIKELIRRFIEAFNKNDMDTLKELFDDDWQFHHASGQTFNDREEFLEWVEKFARDYKLQLHSIEIESVSKDTVTARVHVTVHQDSTGRTAHVTETHFFKNNDYKITETRVHYDTRG |
| 792 | ANDEDEEAVRQVLRRWFEAWNKGDWETLLSLYHDDARITHADTQTTYDKDQFREMYESQLSFDIKISVHSIQFDRASSHTITVTVHFQMHVNTPSRTHTVDVTTTFHLRREDGRWYIVEQRTRRDNKQ |
| 793 | PGDETEEAIRQWFRREVEAWNKGDWETWLSLFHPDVRYHNADTGTTYNAEDLRRMFEQIQSVPFRLELKSIQIDQFTETEITVTVHMQWHFHHKHSTHTVDVTYTDHFRREDGDWYLIERHTQTDNGQ |
| 794 | YDKSAQEAIKEWVEREAEAWNKGDWEAWASLFHPDVQYHNNDTQTTYNLEQLKEMFRQQQKIPHRVEVKHIEIKEMTDDEVKVEVHVQVHFHQKTREWTVDITATFVFRKDDGDYYLIEKHEQRDNKG |
| 795 | ADDEAERQIREWLKRFYEALNRGDIDAVREMLDDDWRYEDAQRGQTYDKDQFIEMVRRMQSIPFQIDITHIEFKRSSDTDITVTVHVQLHVHHKDSTHTVDATDHHHFRNEDGRWKIVRTQTHRDNKG |
| 796 | ADKEVQEAIKDWLKKWFEAFNRNDFDAIMSLYAPDATVENSGTNYEQFERWLREFLKNFQNSSLHVESVEIRLHPDKKHATVHVTVQVTEHHGDQTHHFTYHYTFHFQRTKDDWKLKRQQTQPDTG |
| 797 | PSEEQKKAMEEWVRRYIEALNKRDADKLVSLYDDDATIHVNSSNKEYSKEEFKEWVERMMSIPFRVQLDRIEVELKPGGEITVRVHITITFTRNGQNYTFHGTQTLHFRYDESSWKLVRHEITYNQD |
| 798 | PSPEDQEAIKQIKRRLVEAFNHKDIDKLSELVHDDSTFHFYTSGTTLDKEQFREWVERFMSFDFRIQIKSLEIRLDSGGEIRVTVHFDLTMHHNGQQHHVHVTAHDRYRRGDNGWKLVESRIRFDPD |
| 799 | PSDEEIAKELVRRYVEAFNKGDIDKLASLYHPDARMHDSSKGTTYDREEIIEMLKELIKRGVKIEVKSIEVQTHNGEVRVTVHVTLTDDTTGQTFHVTRHIRFRKDNGDWKIVEDTFTTDTG |
| 800 | PDDHEQVRETDERRIEALNKKDMEKIKDLIHPDATFTNSSEGQTYDREEYIERVKEMLKRGVKIELKEIHVEIRDGDATVHAHMQVTHDETGKTFNVTYTLRYRKSNDKWYLIEVRVTVDDG |
| 801 | PSDEEAVRETDRRRMRAFDEGDMKKVSELLHPDVTFHFDSENRTYSRDEFLEWAKQFISQGYHHEIKSIEIHVKDGTVRVHVEIDQHDRRTGRTFKIDYQVTYVKNNDEWKLVELRYRRDEG |
| 802 | PDDKEQIEEVDRRRLEAIDKGDIDAVASLYHPDATVHYSSQNRTYDKEEFLKMVEEMASQQTAHEIKQIDIQTKDGTVTVTVHVDVTFANTKTTVHVTYTIRYDKQNGEWKIVEVRITTDTG |
| 803 | ASEEEAKEQIRQFKRALVEAINKGDWEALERLITPGATFHHQSGETYDAEEWLEMVRQTIEKFPHRVEIKELHIEIHPSGTEAHVTVHLQVHFTHNGKHETYTFTYHDRYRFKDGRIYLVSSQVHEDSN |
| 804 | MSEKELEEAVRETLRRYYEALDRGDMDELRDLVDDGWTYHHASGETYSAEEFLEMVRQYTETFPTAHQIDSIEIHIDPSGTEVTVHVHVTVHTTHNGRTRTVRVTDTHHLRFKDGSVKIVETHTQEDST |
| 805 | SSEKEIREAIRDIIRRLIEALDKGDWEALDELYADGATFHHWTGETYDKEEFIEMVRRFTERVETAHQLDSLEIHIHDNNRDVTVEVHVTVHENHNGQTHTRTYTSTFHLRVFNGEWRITSEHIQTDST |
| 806 | MSEEEIKEAIKEILRRFFEAWDNKDMDTLRELFAPGATFHEYNGQTYDYEEWVERVEQTLRNVDTAHQIESVEIHIHPNNTTVHVTVHWTAHRHHNGQTHTVRGTTHFTLRRENGDLKIVEMRTQEDST |
| 807 | MSDEEAKEQIKRFKEQWVEAWNKKDIDAIKELVTPGAQFHHQSGQQYDAEEYIEMVEEILKKFDATLEIKSMEIQKNDNNKEYHVTAHIQAHFTHNGSHETYDFTYHDVYRFENGQLKLVRTETHTDST |
| 808 | TSDKEAEEAIRELVKRYAEAMNKGDIDTISSIYAPGAQYHNWSGQTYDYEEYLEWVKEFRSKFDFRLEIKSLEVHIHPNKRTVTVHVHITVHHTHNGEQHTTHFTSTMHFRNQDGEFKIVEEHEQTDSG |
| 809 | PSKKDQEDIKEWIRQFYEALNKGDADAVAELYADDAKYTNNDTQRTFDKEEIREMVEELFKNNTHFEVKSIEIRMQDENTFEVTVHVTVHTNHGNQTHTNQYTQHFRFEKHNGRWYLTSDQTQSDGE |
| 810 | PSKEDEEEVRELIRRFYEAINKGDMDKVRELLTPDIRFHNRSTQQDYDLEQFLKHIEELIKNDTKMEIKSLEIRQDDKDQITVTVNVTATTNHGDETKHRHVQHHWFLRRENGSWKIVEVQVQTDGS |
| 811 | PSKEQQEKIKEWLDRFYEAFNKGDMDKIRELVTPDVKFTDEATQRTFDYEDWLKRIEELHRSDVHIEIKSIEFRVDSKDEVTVHVHLTVHQNRGDQTHTNHVTHTWFFRFENGSLKLVEVRVQFDGT |
| 812 | PSKKDEEDIRDFIRRYFEAFNKGDLDALYRLYAPDATLHIESEQRTYDQEEIREWYERVLRQDTKIDIKSIEIRKVDDHEFTVTVHVQAHTNRGDQTHTAHVTFHFFFRKENGEWKLVEVRIRTHGS |
| 813 | DDQEDKEAIEELIRRWFEAFNKKDWEKVASLYHDDARVHFASHGRTYDKEEFIEWVRTMLSFDVTLHVKSIEIHFSGDTVTVHVEGDATFHHNGQTYHVTVHSTFHFVKYGNQWYLTEQHIQFDQT |
| 814 | DEPEQRKKIEEVVRRYFEALNNKDVDKVLSLLDDDWRYHNESTQRTYSKEEFREMVETLLSLDSEHRIQSIEIQLSGDEATVHVHVQVHTNKDGTTHTVNVTETHHLRQEGSQWKIVETRVTYNPT |
| 815 | DTPEDQEAAEELIRRFYEAFNRGDVDTAASLMDDDWRYHNNSEGRTYDKEEFKEWVEQLLSQDTHLHLKSIEIQTSGDTYHVTSHWDATFNRNGQTFHVSTTDHHRLEREGDQWKIVETRVTYRQT |
| 816 | PSDEEAVREVIRRFYDALNRGDWEELRRLVDKDNWTMHNNNQTFKTWEEFREWVERWFKNAQVEAHIRRIEFNGSTATVEVEVTYHHGDQTYHSRDTHFLQKRGDTWKMLETRIQYQE |
| 817 | NDAEEQIREFIEREAELLNRGDIDAWADFLFDDDKSTFHYNGQQFTTKDEIKEFIKQMVSNSHFELHIDRIEIKDKTTVTVEVTIHITHDNRHRTVHTTFFFRVENGSVKLTRKETTTHQQ |
| 818 | SDLQEAVKEFIKREAELLNRGDIDAWVEFVFHDDHSQFHVDGQTFNSKDEVKEWYERMVRNAEFEFHIDRIQVDDKDHVTVHVTVHVHTENSTFDVHVTIVLQFKDGDLKILSKHVHRQQQ |
| 819 | ANQEQIKEWKERFVEAFNKGDADKLAELFHPGVQVHFAQGRTFHDKDEIREYLERLARHFEMHMEEIRIQIDGDTARVEAHVRITDKRTGTTYDVTYHDVYRIENGQLKVVRSEERTRST |
| 820 | ADQEQIRQIVRNLIEAINKGDLDALMSYYHPGSEVHFSTGRTATDQEEIKDWFEKFARFVQLHLDSIEVHTHGDTATVHVHVTVHDRRTGNTYKFTSEIHFTRQDGTIRLTSEHVHMQPS |
| 821 | LDKKQIKEWVEQYIRAMNEGDADTLASLYTPGATVHFSSGRTFTDQEELRQWYENWARDFHVQLDSVEIHIHGDTATVHVHMTVTNDKTGTTVRVTMTIHFQVENGQLKVKEVRITFQPT |
| 822 | PDKEQVKEWVKQYIEALNNNDRDTLSELYDETKASMHVNGQQYDFDQIVEWYSRYLSQVTQFQLDSLEIRIKDGTVTAHAHVTVHVKHGNQTYRMTATFHFRYEGNTLKLIRVHYHHHQEN |
| 823 | PEDKEIAEEWIRRMIEALNKKDADAVASLYDSDEATMHIDGQTFTTHEEIKRWIQEWLSKFDVQIHMESLEIQIHGDTVTVHVTLHFTDNKTGITFTVHRTLHFERRNGTMYLVEDRLHRQSD |
| 824 | PEAEEQVKEAVERFFEAINKGDWEALERLFADNKATIHIDGQTFTTAEEFIRWFKEFRKKFDVTVQVDEIRIEIRGDTATVTVHWHMTDKSTGTTFRVTTHIRLENEHGTMYIVEMRIHTQDS |
| 825 | PEQEEKVRQLKKRLIEALNNKDWKTFADLFAKDEATFHFDGETLTSKEELIRWFRDFLEKFDVKITPEEIHIELDGDTVRVTVHVQFTDDSTGTTFTADQHDFYVNKNGTLYIVRVEETTKDS |
| 826 | PEFQEQVEEWKRRFIEAWNKRDLDTLADLFDKDKATLHWDGQTFTTKEEIKRFLEEFLKKFDTHIHMESFEIRLKGDTVEAHFHYQGTDNKTGVTFTFDTTDVYVNENGGMKILETRVHTKSD |
| 827 | PEDKEKIKEWIRREIEALNKKDLDAWASLFDKDESTVHIDGQTFTTKEELKRWWEEFLKKFDVHFHLESIHIEIRGDTIHVTVHVQVTDNSTGTTVTFTAHIRFERQNGGWKLVEKRVHTHNS |
| 828 | PEIKEQIKELKKKFVEAFNKNDVDALKELFDKDKAQFHFDGETIHTADEFREWVERFLRTFDVQMQMDGIEIHLDGDTATVHSTFQVTDNSTGTTFTVHATDHYVRENGTLKIVRTQFHTQSD |
| 829 | PDIEEAAREIVKRLFEAFNRGDWETLVRLYSDNKSQFHYNGRTFDTWEEFVKWVKEFASQWQLHVDSQEIEVKDKDSATVHVHVTMHHKTKTVKFTSQFHMRREGNEWKVVREHVQTDGT |
| 830 | PEEEMQKHIKEYVERYYTAINNNDLDTLESLIHPDWQLHNSNGRTWNDREEFKKTVEELFRRNIRIEVKSIEIHIHDDGSVTVHVQVTIHHEGHTTVQTRDTHHFQREGDKFKLVETHIQYIPT |
| 831 | PEKEAKEEIKKMIERFFEAFNKGDLEKLHRMLHDDWQFHLWNGQTFNDRHEFAEWVRQMHEAGVKMEVKSIEIETNDDGTYTVHVHVKVHTPGNKTYDVTETHHIERHGDQFRFRETRVHMTPT |
| 832 | DDEKEMEEAIRQWLRRYVEAFNNKDLDTIKELFDEDWTYHHTNGQTFTTLDEFEEWVERFLKRFDFEMHITQIDIQIFGKETVTVTMHVKVTFRETNRTFDITEHHHFERKGDEWKIKETREHRQPT |
| 833 | PEEEEMKKQIREVLRQFYEAFNNKDLDALSSLVHDDATFHFSDGSTLHTKESFRDWVEKFLKRFDFRIEITSIEIRIHGTHEVTVHVTVHVTFNKEKRTYTVHETHFFRRDSTEWKITRTQFNWQPD |
| 834 | PDPSAEEAAKQIVEELVRAYNEGDMDAFEEAYHPGATMHLPNGQTFTDLEEIKEWYERFKRTFPSRLEIKSIEIRQDSETTYTVHVHVQMHRSDGSTFNFTSTMVFVQKNGSWKIVEEHIHTQST |
| 835 | LDPEDEEAIRQMIRRFAEALNTRDREKLKDLYDDHFTMDLGNMDAEQIKKWLEEFLERFKTFRIQIDSMEFEKDGDEVTVHVNVTVTHGSTGRTFEVTRTFFFRKTPDGWKLTNDHVHTRERK |
| 836 | MSEEELREEVKEWLRRFYEAMNNNDLDKLRELLHPDWQHHDYSSGKTHHSREEFLEWVKQFLSQGWELEIKSIEIEVNGDEVTVHVTVQAKHPSGSTLTFHDTHRFEFRNGQMYLVETHTRVQQT |
| 837 | PTGEEEIEKIARRLYEALDKNDIDTFVSLFHPGATIHFSKGETLTDPDEIRKWFAEWLKSVKSTAHEIKSIEIRGDTVTVHVETHLNHGDKTHTISVTDHYHFVDKFLTNVQSHENPT |
| 838 | PSKDAQEAARQWVRRYFEAINKKDLDAFASFYHPDVRQHVNSEQRTFDREEIVERFKRYVETFSSFRIEIKHIEIEVRGNTVHVTVHVTVHHPQTGTTYDVTRHFTFELEGDSFKLVRDEVQTHQR |
| 839 | PSPEQEKAARELVQRFYEAINKGDWETAVRLLTDDWQFHDSSGQTLHSLEEFREWFEKWHRAGFHIDITTIEVRLIDKDEIQVHVHAQVHSRSGRTTFNTHDTHHLRLFDTDWRIVRTEVRMQPT |
| 840 | SDEEDERKIRDILRKYFEAFDKGDADKLKSLYDDDSTFHDANGQQFTDKDEFKEWYERWKSQFPTVHREIKSLEIRFDGDTVTVHVHVQVHVHHESSTVTIDVTATFHFERENGDWKIKEVRVHWDEKRQ |
| 841 | TGEETEEAIREFKRKFLEAFDNKDLDKLKEIIDPDSTFHFDSGFTATSLEEVVEFLERLLRTYKDTAHKIDSMEIQQDGDEVTVTVHVTVHVNNDTSTITIHITAHDRYRKKDGDYKLVETHFHFDQRQE |
| 842 | SGSEDEEKIREWKRRFIEAFNNGDLDKLAELVHDDATFHFSEGYTATNRDEVKEWFERVMRQFPTMRMEVDSQEIRVSGDEITVHTNVTVHVTNETSTTTIHVTTTDRYEKKDGDVKLTESRTHFDQRQS |
| 843 | PGEETMKREVKKWVERFYELFNRKDVDALASLYAPGAQFHDSSTGTQYDREEFRRWLEEFFRRFPNVQIDVQRIEIQIHSGNEATVTVHAQVHFKDSNYTVTVTQHFHFRYKDGTWKLTEDRMHFDQDRS |
| 844 | PGEETAKEEIKKILKRFYDLMDNGDMDAMASLYHPGARFHDDSKQQTYDLEQFREMVKRFLERFPDIQRHIESIEIQIDSGDEATATVHVTLTNKSNNQHVRVTQHFRFRYKDGTFKIVEDRIRTQNQNT |
| 845 | PGEETIKEVIKEWLRREFEALNNKDIDKWKSLVDPGVTFHDDSKKQTYDVDQVAEMIKQWLETFKDVRIQVDEIRIQIDSGDEAHVTVHVTFHYRSSSTQVHVTYHLTFRYKDGTWKLLSKRAHTDNQNS |
| 846 | PSEEEAKEQIEEWLRRFYEAFNQKDLEKLKSIVTPDATFHIYDGRTFTTLDEIAEYIKEMLSNESKIHIKSIEFHVNPDGSITVTVHVEVHTSNQNQTYRFTHHWHFKVDHDGQWKLVEVREHVDQHS |
| 847 | PSAEEAAKEIARRLYEAINRGDWEAVRSFYSDDATMHVSEGYTYKSWEQIVRWIQEWFKRDWQIQVHSIHVEVKHPDRFTVEVHAQATNSSTGSTVTITQTFHFQRKDGTWKIIHDHMHIHQQ |
| 848 | PSDEEIIREILERFYEALNKGDWETLSRLLDKDATVHISDGVTHTTLEQFREWVERFHSSGSKIHIHSIRIETKDKDSITVTVTVTVKNDQTGGTVTVTDHYHFRRENGSWKIVEVHSHFHQD |
| 849 | PDIEEQIREIKRRLIEAFNKGDLETLKKLFDKDATMEISDGVTFTSIEEILKWFEEMNRNNYKLEIKSIHIQVDSKDTVTVTVHVTLQQDDTGRTVDVTFHDHYVFENGELKILRSEIRFHQR |
| 850 | PDAQEAVKELVERFIEAFNKGDWETLKEIITDDWQNHDSSGITFTSAEEFREWVERILKDTRQITLKEIHIQVEHDDHVTVTVHIEQTNSKTGQTFTATEHHHIQRRNGSWKMTETHVQFHES |
| 851 | PSEEEIRELVRRFLEAFDKGDADALASLYHPDATLHVYNGRTFTTRDEIKEWIERWFKAFSDVHREIKSMEIRGDTVTVHVTVHAHHKDKTVTYNFTSHFHFKDGKLISEEVHVDNTES |
| 852 | PSIEEAVRDWIRRYFEAIDKKNLDELIEMFDEDWRYHLNGQRFSLEEFREMVERFLKSFPRVHHEIKEIEVHITKDHATVHVHVQVHLHQGDQTITIHVTETHHFRQENGSVKIQETHVDTKPS |
| 853 | ASEEEAREWVKRYIEAFFNTKDAETAASFYTDDAQVHHSNGQTFDNKDEFKEWIKEWAKRAKRVHFQINSIEVNGDTVTVHITVTFHHDDRTTTTDFTSHFHFKDGKLTSERVQTHTHNE |
| 854 | NPDEEEARELVKRWADALNRRDIDALKELIHPDATFHVDSETYDRDEYIEWFYKQFASHVTRVELKEIRVEKRGTTIHVEAHWTVHETHGDKDITVRVTTHFVFQKDHDGRWYLVELRIHFDHS |
| 855 | DPDKEQVREVKKRFIEALNNKDLDKVASLVHPDAQFHYDSETFNYEEFREWYFKMIASHAERIEIHEIRIHVSGDTVTVHAHYTVHFTHGDQKRTVHITSTDHYRRDHNGQFYIVRMETHADHS |
| 856 | DEKEARDAAREVVKRFAEALNHRDLEKLKSLYHEGATITFNGRTYRNPSREEIAQWFASLPIYRIQWQIDEIRVDGDEVTVHATVHVTHRNGNTVTFHSTFFLRRKDGEWKIVSEKVDRRQS |
| 857 | DEKEQEEQVREWIRRFAEAVNNKDLDTLAELLDKDWTVHYNGETYHTPSKEEFKEWLSSIEIKRLEVHIREIEIRGDHVTVHVELHMTTSSGKTVRFEETHHFTVKNGELRLTRTHITTYND |
| 858 | TSEEEAREIAKDIIRRLNEAINNNDMDALRELYAPDAQFTDASTGQTFDLEEFIKMIEEMLSSGTRIEFSIEEIRVSNNHVTVHITVHVHTGHTTQTVRRTIHFRVKDGEMKIKRDEINRNK |
| 859 | SSEEEAREAVKRLKTRFVDAINKGDLDAIRELFHPDVTFEFASEGQEYDLEEFLEWVEKMLSNGTRIEFEIKEIQLSNNHVTVHVTLHFHTKDRTQTVHQTDHYRLVNGEWKIVRVHIDRQP |
| 860 | MSEEEAKEAVKDWLRKYFEAINNNDLDALREMMAPDWRYHNADTKTTLDKEQFLKWVEDVFKNRTRFEFHVDEIRLSNNHVTVHVTVHLTTDDRDQTVHETHHLRYKDGTWKIVRTHVQTDQ |
| 861 | YSEEEAQRDVRELVERFYEAINKGDMDTMESLLTPDWRYTDDSTGQTYSRDEFKEMIEKMLSQGTKIEIHIREIHVGKDHVTVHVEVHFHTGDRTQTVHDTHHFRLVNGKFYLVETQTNRNT |
| 862 | SSEKETEEEVRRLINEFYDALNRGDIDALREILHDDVQFTNESYQRTFDKEEFLDWVRKMKSRNTRIEWEIKEIEISNNHATVTVEVHYHTNDQTYTFHDHYHFRLSNGEWKIVRVQSRSDQ |
| 863 | DDEEMKEQAKEIIRRFYEAINKGDLDKVREILDEGWRFHDASKQQTFNKEQFLEMVEEMVKNNIKIEIHFKEIQIDDKDEVTVHVEVHIGNVTTTDTHRLRRTKDGWKIVETRFQVHN |
| 864 | DKREDKEAIKEWVEREARAFNSGDMDAWYELFSPGAQFTNADTNQTYDIDQMKEILEKLWKAGFSLHFEIKEIEVKDDHEVTIHVEIHWRNQTVTYTDRFERDKDGWKITHRRIQTDN |
| 865 | TTEDEARKAVRELLNRMYEAMNQKDMDKIYSMYAPDVTFHHHNGQTYDLDQFKEWVEKFLRHFELHWEIKEIQVHNGTVTVHVHVTAHTNGRTLHITQTFHFEFRGDEVRVKEDHIHEQS |
| 866 | SSREEAEEIARQILNRFYDALNKGDMDKVKSLYHDDATFHHNKGETYDLEQFIKWVEEFIKHWELHWSIEEVRISNGEVTVHVHVQMHGDGETIDVTQTFFFRREGDEWKIVRDEIREQS |
| 867 | PSEEEAREIVKEFIKREAELFNKGDMDTWYSLFHDDFRLHHASGQTYNLDQVLEMIERLARNFKMEFSIKRIEVHNGEVTVHVEVHFHTNNKTVTVEFTDRLEMHGDTVQVTHRHVREQE |
| 868 | NSREDAEEAVRQLIEREVEAFNKGDMDTWEDLFHDDFRFHDSNGQTYDLEQLKKWVKELAENAELHFSITRIEISNNQVTVRVHMTFTTHNETRTITYHDHIRQEGDEWKIVRRQQQPDS |
| 869 | PEEEELREKVKEAIERMARAWQHQDLDKIKSFYDDDSTVWYNNIDAEEFERWVEEALRRFKDARVEFHIDEIRVTDPTHVTVHVTFHVTTPSGQTHTSTRTFHFRFEDGQIKLVEDHVYNQQT |
| 870 | DRREEIKEKVKEWLSRFYEALNRGDLEAIARMVDPDSTFHSDNKDWEQFVEWVERFLKRFPDVRFEWEIKHIQIETKDHVTVHVEVHVTHKDGSTQTSRETHTFEFKDGRLRLVRTKSDNQNT |
| 871 | PKEEELKEKVKEAIERMVRAFNHGDLDKILSFYSDDATVDTNGESLEQFKEWVERFLKTFKDGRMTFEIKHIQIEHETQVTIHVEFHFTTPSGQTQTSRRTFVFRFEDGQIKLARDKFYNQQS |
| 872 | PSEKELEEQVREWLRRFFEALNRKDVDEVASIFDEDWRVTHHTQTYNLEQFKEWVRQMLSQVESIEWQIDEIQFHGDTVTVHVTVHIHYTGKTVTVRETHFFTVENGSLKIKETRIQEDEVK |
| 873 | MSEKELKEAVRRWVERYARALNNKDLDALASLYDEDATMHINNQEYSYEEIIRWYKEMLSQARRFQVHIDRIEVNGDTVTVHVTMTIHYQDKTVHVHVTFFFKFENGELKLKRVEFHEHEQS |
| 874 | MSEKEMKEAVKEFINRYYDAFNKKDADAIASFYDDDATFHYNDTTYDKEEFKRWVTEFLKNVERVEWQIDEIEVNGNHVTVHVTATFHHPGKTVHVTQTFHFTFENGSMKLKEDRLHEQEQK |
| 875 | MSEEEAKRAARELIRREFEIFNSGDLEAWASYFHPDARMHIHDQTYSWEEMKEWFKEMQEKVERIEVEIKEIEVRGDTVTVHVEVTIHHPNKTVHAEVTIFLRIENGQFKIISKHIRTQDQS |
| 876 | PSAEEAARDLVRRWAEAFNNNDLDAVASLYHDDARVHHQNGQTFDKEEYKRWVEEMFRRAKQMEWEIKEIQVENGTTVTVHVTFHVRAYNITFHMTFHFRVENGQWYIIEQHISTEN |
| 877 | PSDEEQIRDFKRRYAEAINKGDLDALRELLHPDVQFHHSSGETYDLEQWKEWVRQFRSQAKELEVHIERIEIRNGTDVTVHVTVHAKATGTTFHATDFYRKKDGSWKIVEVRLHTQE |
| 878 | PSDEEAVREWKKRFAEAMNNNDLDALAELLHPDATLEHQNGQTSDREEIKEWAERLWRTATSIQVHIDEIQVDDGERITVHVTIHFKSRNVTVHATDHYEKHNGEYYLVRSQFHEQD |
| 879 | TSEEVERKIREWFRRFVEAFNKGDMDTLAELYAPDARMRAYNLDKDDIKRWFEELFKNDVKVEFEIKEIQQDGDTATVHVTFHFTDSRTGKTTTFHSTFFFEFQDGELKLKHEQVHFSDQ |
| 880 | PKDAEQKIREWLKRFYEAFNRGDADALLELLTSDSNVTFHEASGRTFTTLEEFREWVEEWLRQNWKTHIKSIEIRPDSKDEYTVHVHVEVRGTNQTIKVTETHHFRFENGSVKLVETRVRWDHG |
| 881 | PVSEEEVREAVKRFFDALNRGDWEELLKLVDESQWRFHNADGSTLTTKEEFRKWVERLFRENWQFEIKSIEVRITGEEVTVHVHVQVTQRDTGKTFRVTETHHFRRGKDGWKIIRTQVHVDPQ |
| 882 | PEEDEIRERVKEFIRRFYEAFNRGDVDALMSLIHPGATMHIDGQTMTSMEEIKEWFERFFKNGFKDAKLDIDEIRIQINSGDTVTVTVHVTITRQNGETYHVTNHDRFKYDKDGLKLVHHQAHTDN |
| 883 | PEEDEVREAVKEFLRKFYTAINNNDLDAIASVLTPGATMTLNGRTFTTKEEIKEWFRQFFERGFKDVKLQIDSIHIQINSGDTVTATVHVTVTQPDGSHIKVTHHWHFKYDKDGFRIVNVQEQSHN |
| 884 | PEEEEIKEAVKEIIKRFYEAIDNNDLDAIKRLYHDDATFHDSEPRTYHSKDEIKEWFKRWFESGWTDSRHEVHIREIRIDDKDQVTIHVTVHVTNADGSTTTVHQTFFIQRHNGEWKIIEDRVHTES |
| 885 | PEEDEIRTQVIEVIRRFYEALNHNDLEKIKRLMHPDATMHIFDGTTMTNLEEIIKWLEEWMRTFPDFRIEVHITEIEIRGQGTVTVHVTVHITNKDGSTQTFHHTWFLTQHNGQWYIVEVREHRDE |
| 886 | PQEEEMKEKVKDWVKKFAEAFNKGDADALASMYTDDSTMHISDSTTFNNREEIKRWFQKLMSQNIQMHVEIKHIQIHGRTHATVHVTFHLTHQNGQSVTIHSTFFFVFENGQLKLTNEQIHFQQN |
| 887 | MSEQEFEEIARDYVRRFAEAFNKGDFDKLKSLLDDDWTFHHSSGRTFTTKEEFIEWVRQFLSNGFQIHFEIKEAQLHGTNHVTVHVTFHFTSKDGQTHTFHETHFFRFEGDSVKIVETQLHTDH |
| 888 | ASEEEMKEAAKEIIRQIFRAFNEGDMDAIKSYYAPDATVHIWNGETLTTQEEIVKWFERLFSQNIEIEVHIRRIEINGTDTVTAHAEVHMHHPSGQTYTYHSTFHLELKDNRFFVKEEHLQRDH |
| 889 | MSEEEMAEAAKEIIKQIVDALNNGDMDAIASYYAPDAQLHIWNGQTFHTLEEIKRWFEELFKQNWEIEVHIREIRINGSTHVTVHVELTFHHPSGQTYRFESTIHFEVVGDRMYIKSEHIQSDH |
| 890 | PSEKEQEEAIREWLRRFYEAIDNGDWEAIRRLLSPDATMHVNGRTFTNLDEIVEYIRRWAENIQTAHEVHIREIQFHGNEVTVHVTVHATNRKTNSTITFHDTYHFRYRDNSWFITEVRSQETT |
| 891 | PVGREAAEKFVRRLYEAFDKGDRDTFDSLFDDDWTFHDSNGETITTKEEMKKWFDTMFKQLGDTAHEVHIKHVEEKDNGRVTVHVEVHQHIKKTGTTRTVTDTHHFQYKPTGVYVVETRSQWHN |
| 892 | SSEEEIKEAAKQIVRRLVEAFNHNDLDKLREIYHPDAQMHWNDQTFNSLDEIVEWIKQYLQRLRGSRIEFEIKEIRIHGTDEATITVQFHVHYSGENQTTTYHSHMRIRLEGNKWKILSEHVHEDST |
| 893 | ASEEDQQEIKEFIKREAELWNRGDLDTWKELFHPDATLHDSSGITFTDQEEIHKWLEEFLKDNFKDTKIEIKSIEIQADDKDQVTVHVHITVHINGQTFNVTQTDRFRKDGDRLKIVNRHVTIDNS |
| 894 | PDAEEDIKRLKEEFVRAFNTDLDTLKELFHPGVTFQSDNITFTDRDEIKKWFADLRSTMTVQVDRIEIQKNDDGTVTVTAHMTVHTPTQTFKVTAHDRYQLTDGRWRLVSSRFHRHDT |
| 895 | PSDEEDMRQLVRRLIEAFNKDVDALFEIFHDGWRFHWNTQTFTDREEFREWVKELQSTTHIEIKEIRVEKKDNGEVTVEVHVTFHTPTQTFRVTETHHVRKEDGRWRFIETRVQTHSS |
| 896 | PEEEEMKEKVKEWLERFYTALNRRDADAVASLYAPDSTFYVSRGETLTNPEEIKEWFKRFLDTFPDLKIHFTMEIHIHGRTTATVHVNMHVTHPSGQTYTFSQTFRFEFHNGRLKLTEDHLQTIQT |
| 897 | PQEKEAQEKAEEIIRRFAEAFNKGDLDAFRELYHPDATMHVWEGRTFNSIDEIIEFFERVLRTFKDLEMHVTIEAHQSGDTHYTVHANFTVHQPDGKQVHYHSTFRLRLKDGEIKILEEHISRHQT |
| 898 | PEEDEMKEAVKEILRRLFEALNRGDAEAIARLLDEDWTFHDAEPRTFTSRDEVKEWVKEMFKNDFKFHVESIEIQIYGRSTVTVHVHVTVTNKNGQTYHATETHHIRRKDGRFQIVETHNNWQPT |
| 899 | PYEEEMKEKIKEWVKREIEALNKGDMDTWKRLLDDDVQYHDSQPRTFNSADEMKEFFKQLHDNNFRLELKSLEVQIHGHSEVTVHVTVTVHHSSGQTYHNRYTDRFRFNNGELKLVERQAYWDST |
| 900 | DVSEEEAREAIKDWVRRYAEAFNRGDLDAFEELYHDDAQMHLSNGQTFNNKEEIKKWYEEFFRRFPGTQLEFQIDRIEVGHPGTYTVHVTFHFHHDSGKTTTVHATFHFEFRGDQMYLISVHYHTDNYP |
| 901 | TSEEEMKEMAKEVIDRLFEAFNKGDWEKVKSLLHPDWTYHHSNGQTFTTRDEFAEWIIKFWSQGWRIEWEIKRIQIDDGKEVTVTVQVHYHHQSDKTTDAQEHHRLRVDDDKEVKVVETRVHTDEKPK |
| 902 | MSEEEAKEIVKDLLRRMYEAINNGDMEELKRLFHPDWQYHQNKGRTFTTLDEFVEWAAQFWSNKWQLHWSIKEIRIHNGREIEVHVEVHITHESDRTITVRETHRFRVDDDHEVKIVETHTQIDEQPK |
| 903 | PGSEEEIKDLKRRFAEAFNNKDAETLASLYDEDVEFTEDKETYKLSRDEFKERWEEQMKKQFPDLQVQIDSIRIENKNGDEVTVHVHLTMHVSDGQYHFTQTDVYRYQDNTWKIVRTQSHTRGG |
| 904 | AGSKESIKEALKRYFEALDKKDADTLAELFDEDWTDTQDDETYHFSREEIREWFREFQSKHFPDSRHEIKEIRIQENDGERFTVTVHVDVHVKDGTYKVTEHHHVRVEGDKLKFKETRSHRQSS |
| 905 | PGSKESIKEWKKRYIEAFNKNDADKLADLVDEDATFTHSNETYKLSKEEYKERVERIFKTHFPTAQIEVKSIEIENKDGDQYTVTVHVTIHVKDGTIRATQHDVYRFEGDQLKLVRTQEQHHGS |
| 906 | DQHAEEAAREIIKRFYDAFNNGDMDTLKSLYHPDATFHDWNGQTFTSRDEIKEWLKQLFDNGWRIHFSIKEIQVHGTDEITVHVEVHFTNTNSGQTYTATQTFRFVLQDGKWYLVEDRLQRTG |
| 907 | DKDAEEAARELVERFYRAINNGDLDTMLSLLHPDWTYHDSSGRTFTSREEFAEWVEKLFRNDIKIEVHIKEIRVHGTDEATVHVEVHFHNTNSGQTRTTRDTHHIRLQNGQWKIVRTEVRWTD |
| 908 | DQSDEEAIREIIKRFYDAINNNDPDKLRSLYHDDATFHHANGSQLDDKEQIVQFFAELAKQGWQLEFSIKEIQFFGTDTVTVHVDVRMTQTNSGRTTTFHQTIVITKINGRFFIVRDQLQETR |
| 909 | DKSMEEKAREWKRRFVEAFNKGDMDKLKSLLHPDATMHNADGRTFTNPDEIVKWFKELHDNGWQIEFSIKEIQIHGRTHATVHVEVHFTNTNSGKTITVRVTDRYVFKDGQIYLTESRFHFTD |
| 910 | DQHDEEAVREVMDRLYEAINRRDLDKAASLFHDDWTLHHANGQTYTTIEEFKDWVKKMLDAGVEIRWKIDEIRVFGNTEVTVHVTVHMTHTNSGQTQTFHDTHHLRKINGQWYIIETRVQETG |
| 911 | TSEEEIREWKKRYATAFNNNDWDKLRELVHPDAQFHFDEGTTFDNAEEYIEWLRKFFTTKHQIRFQIHIEEIRIHGDTVTVHMTVHGTHKSGQNYTWRVTVHDVYKDGKLTSTELHTDQHD |
| 912 | MSEEEIKEILRRAFEALDKGDMDKIKSLYDKDAQFHFTDGITIDTLDEFIEWFVKFFLANSEAQYSHHVEEIRIDGDTVTVHFTVHVTHSSGQTITFRATSHFEFRNGKIQSEREQMHQED |
| 913 | PSEEEIKEFIKRWAEALDNGDRDKLKSLYDDDATLHVSEGYQMDNKEEIVKWLAEWYLKLFTDVKRQIDSIEIRGDTVTFHVTVHMTRPDGKTVTVHQTSHMHFRGGKLVEQHIQTDEDEG |
| 914 | PSEEEIKEWIRRYLEAIDNNDIDKLKELFTDDWEYHNYSGETVHNPDEFIKRWEEKFKKRVTRSKHDLDEVRIDGDTVTAHVTAHFTHKSGKDVTQHITEHHRFENGKLKETHETTHQDDG |
| 915 | SSEEEIREWLKRFYEAIDNNDMEKMLRLVDDDVTFHVYQGITFENAQEFIEWWAQSFRRRFTDSRHKIDEIRIHGQTVTVHVTVTLHHRSGRTFHRTVTEHHTFRNGKLVETHVHEDQKDN |
| 916 | ASEEQIKEFIKQYIELLNKKDIDAIASLYHPDAKLHDSDGSTYQNRDEIKEKWFKEFFESVDEMHIEIKSIHIDGDTATVHYQVHLTRGDRTHTYDVTDHFRFKDNKITEKESRMRDTTS |
| 917 | PGAEEAVRQVIRRYVEAFNNRDMDTLRDLYAPDATYHNAKRQQTYSYEEFLQMVREFLEKFDFHLTFRIDEIRVTGDEVTVHVTFHLRRNDHKTEHQVHSTFHLRRKDGTWKIKEEHAHFDDK |
| 918 | PDAEEAIRQLKRRFLEIYNTKDLDALRELYHDDVKFHNAKRNQTYDKEEYLQMVREFMEKFDFKIEVQIQEIEITGDEVRVTVEVHITREREGRTFTVQYHDRYRFENGTVKIISTQAHYDEQ |
| 919 | PDAEEQIKDFKRRLAEAFQNKDWEALASIFDDNVTFRFASTNKDYDKEEYIQMVREFLEKFDVEVEVHFQEIEITGDHIRVRVEVHFTIKKEKKTYTATYTDRYRVENGDVKLVSTEIREDSQ |
| 920 | PSDEEAIRQWIRREAEAFQRRDLETWASLFTDDSKVHDESTQTTFDKEELKDRVREFLEKFDFHVEVHIQEIRVTGDTITVTVEVHFTNNDEKKTHTVQYHDHFKKKDGQYYLKERHARWDSQ |
| 921 | PGEKTAKEAARELVERVAEAVDKGDRDTLRELYHPDATMHIWNGRTFKNLDEIIEWFTQFGSDLQRHFRVDEIEVNGDTVTVHVTFTVHHSDGKTIRFESTFFIERKDGSWKIVEERIHADSG |
| 922 | PGQETAERAVREWIRRFAEAINKNDMDALEELYHPDAQMHISDGRTFDSKDEIKEWFREMAENAQFHFSIDEIEVRGDTVTVHVTVQVHRRDGQTYTYHSTFFFRQEDGQFYLLEERIHNRSG |
| 923 | PGRETFERQVREWIRRFAEAFNKRDMDTLFSLFHPDWTFHDSSGRTFTSREEFKKWAEEFASHFQLHWEIKEIRVHGDEVTVRVEVHFTHRNGQDFTFEETHRFRLINGQLYLIETHLRQDGG |
| 924 | PGRKTMQEQVREWLDRFYTAMNNNDADALKSLYHDDATMHIANGRTFKSKDEIKEFLTRFASQFELHWSVEEIEVHGDTATVHVTVTAHHKSGQTYTIHQTFHFQFSDGRLYLTHDHIDNQSG |
| 925 | PSEEEIREDIKELLKREAEAFNKRDLDAWLSLFAPDATMHDQSGQTFTTLEELKEWVKQLLSQNWEVEVHIDEIEVRGDHVTVHVTAHFTNQDTKQTITVHFTIHFQLRGNEWKIVEKHISTRQT |
| 926 | VSEEEARERVKEWIRQWVEAFNKGDMDRLKELYHPDATMHLSNGQTFTTQDEIKEWYERLFRQNYRLEVHIKEIEIRGTTATVHVELHFTNESTGSTFTVHTTFHFQFEGDQVYLVEQRSHTDQT |
| 927 | PSEKEQEEQIREAYRRLAEAFNKGDMDAIKSLYHDDAQMHIYNGRTFNNKDEIKKWWAELFKQNWQLQIEIKQIDFNGDTVTVHVQFHFTNESTGTTMTVDATHRWVFEGKEVYIIEVHYHTRQN |
| 928 | PSDQEQIEELLRRFYERFAKQQDWKAFEEFFDPDAQYHNNNQTFHTLEEIVRFFKEMLERMQDVRFEVEEIEVRGDTATVHVTVHVTRNGKTITYRVTHHWVFKDGRVVEVREHTSEHD |
| 929 | SGEEDEEDIRQIIRRYAEALNRGDMDALESLYAPDATVHDSSGRTFTTKDELKRWYDEWLKKFPQRVEVHIKRIEFHGDTVTVHAEFHVTTKDGTQTTTATFFFVKDHNGQWYIKEVHWNSNG |
| 930 | AGEEDEKAVRDIVRRFYEALNKGDWEALASLYHPDAQMHLSNGQTFNSREEIVRWFREFLEKFPLQVHFEIKHIEFRGDHAHVTVEVHITTKDGTMTITQHITMTRDHDGSWKISEDHINFNG |
| 931 | SGEEQEEKVREVIRQYYRALNEGDMETLKELIHPDATFHFSNGETLTNLEEVIEWFKRVFERFPFRIHFEIKEIRFDGDTVQVHVEAHVTHKDGTQTFHDTYFFKFDSNGRVKIVEVHSNANG |
| 932 | ASEEEIRRAIEEMVRREAEAINKGDWEAWLSLFDDDATMHVSKGETFNSKDELRRWFEQLVKNNVKIEIHIIRIEIKDKDTATVTIEVHFTFTTYGRTITVNAHDHIVFEDGRFKITERHVTEQPN |
| 933 | DVSPEQYEKIKQFLRRFYEAVDKGDMDTFVRLFADDWTLHVDGRTFTTKEEVKEFFERFHRNADVERHIEDLHVEQKDGYVTVHVRVTVHYKESHQTHHYQETHHVRFDHNGQLYFVETHVHTEN |
| 934 | DASPEDEKEIREIIRRLYEALDRGDVDEFVSLFHPDAQFHSDGETIHTLEEYKEWVRRLHENADLRREIKRLEIEQKDGNATARVHVTVHYNESHQTHHYTHTWFFRRDHDGQWYIVEVRAQTHG |
| 935 | PSEEQIKDILKKFYEAIDNGDWKTLRELVHPDAQYHHADGTTFNNVEEMAREFAEKWFKNNDTAHELEEIRIDGDTVTVHYTLHVNRGDTTYTFRGTDHFRFRGDKITEIRSHIQQTD |
| 936 | ASEEEIRDLIRRFVEALNNKDRDKLKSLYHPDAEMHIYQGKTYTNLEEIITFFFEEFFSNNDAQIEIKEIRINGDTVTVHVTVHENHGDRTHTFDVTSHFHFRGKKLTEEHIHVQQTD |
| 937 | ADEEFQEHVKEFKKQLIEALNKKDVDKFVSLFSDDATVHYNNGETLTTKDEIREWVERWIKSFKDFKIEVKSIEIRGNTVTVHMTVHMTHDSSTHTVDVTSHDRYENGRLKEMEQRHNQR |
| 938 | TSEEEIREIKKRLLEALDNKDLDTFASLFHPGATVHFWDGYTAHDQEEIKEWFAQFFKKFDDDYRHEIKSMEVRGDTVTVHVEQHAHKRPQTFTITTHDRYENGKLKESRIHRNPQ |
| 939 | MSEEQIRDWKRRFFEAFDKRDLDALAELWHPGATVHFSDGTTVTDKEEFKEWFARFFSRFPHDFRHEIKSMEIRGETVTVHVEMHWTSHPKTQTITVHDHYKDGKITESRFHVNDQ |
| 940 | ASEEEIKEWVRRFVEAFDNGDLDTLVSLFDDDWTFHHSNGQTFTTKEEFKEWVKQFFEKFPQDLRHQIDSIEIRGDTVHVHVTQKHRDDKTTRKITETHHFKDGKLKETHQQHDDT |
| 941 | TSEEEIRELARRYYEAFDNKDMDALKEILDDDATFTNNSTQTTVDAEEYIEWMERWLRRFPRVRHEIKEIRIDGDTVTIHVQVHFTTRSSQTYTVDVTHHWHFRNGKVVRLQVQTHQRE |
| 942 | PISEEEIKEWLRQFFEAFNRGDLDTAVSLFHPDATVHVSDGITFTNLEELREYLKRLMDNNAQIEVKSIHISDGTVTVHWTMHMTHGDKTVTIRGTTHFHFRNGKLTEMHIHVDHNR |
| 943 | PSEEEIRDIKRKFAEAFNKGDLDTLKELFHPDATVHFYIHNTTAHSLDAFKEWVRRFLRIPFTVHIESVEINGSTATWHMTVTFHHNGKQHHIRYTVHDHYTDGRIRETHFHVDTG |
| 944 | PSEEEIRELKRRLVEAFNKNDVDKLAEIFHPDATIHFYQEPSTVHSKEAFREWVKKMARTPFRVEVKSVEFHGDTVTWHLQFTFTQDGKEVHIRVTVHDHYSDGQITETHFHFDEG |
| 945 | SDQEEIRQWVRRFIEALNNKDMDTIASLYDDDATLHVYNGQTWTTREEIKDWFRQLIEKMKDVRFEIDSIEVRGDTATVHVTVHVHHETSTHTFHITSQFHFKDGKLTEEHIHENDT |
| 946 | ASEEQIEELIRRFYRAMDEGDVEALAQLLHDDATIHFYNGITITSKEEFKEWVKRWQSQFQRIHRQIHSMEFHGDEVTVRVTLTVHRGNQTVHYRYQHHWRVQGNKIVEVEVRSDSQPT |
| 947 | AGTEKIKDLLKKMYEAFDNGDWEAVASYFHDDSEVHFQGGITIHSREEFEEFIRQVLSNIKSLQREIREIRIDPSTQRVTVHVELHWNLGRRTVTVTETHVVRGDQITHTHVQEDQQ |
| 948 | DSEFQQKVKDIKQKFIEALNNKDADKVASLFHPGAEIHVYQGITFTDVEEFRKWVEEFLRHWKDVKFQIERIEIDGNHVTVHVTVTFNHDHPGQLHFHFTFHDVYRNGRLVRTQINSQPKN |
| 949 | DREEQEEEVRKWKKRFVEAFNNRNWEEIASLIHPGSTFYHTGGQPSDKEQFVRWVKEMAERIDHVEVHIDEIQFHGDTITVHVTSHFHQGDTTFTVHQTDHYQKRGDTFRLIETHTHRDS |
| 950 | DKEEDKEAIKQWFRRYFEAMNNKDIEKIASLFSDGWTYYSPGGQPYDKEQFKEMVKKLLDQIKQIHWEIKEIRVDGNTITVHVESHIRINDKDITFHETHHFEKRDTQFYLIETHVQSKD |
| 951 | PSLEEQIREWLKRYYEAFNRGNLDELAELVDDDWQYHDEKTQRTFHTREEFREFVERVMRTFPTMQIEIKRIEINGNTVTVHVTVHVTHPNSHTTVQVTEHHRFENGKIKETHTREHQQD |
| 952 | PSWEEQIREWLKQFYEAIQNKDLDALARLIHDDARIHFESEQITLTTKEEIKEWFERFMKRFKNTHVEIKHIEIRGNTVTVHYHVTVHHDDRTVHFTVTDHFHFKDGKITEIRSRIEERR |
| 953 | DEEEETEEQARQVDTRRFEALNRGDRDTVRSLFHPDATYVDSNGQSYDYEEFIEWVKRHRSDQQHLEFTIKEVRINSENHVTVHGEVTDQRTGVSATYTAHYRKNGDEMKIIRLEVNNNN |
| 954 | DEEEKMKEIVRQIIRRELEAMNNNDLDAWLSLFHPDATYTQQNGQHYDREELKEMFERHRRYHSNIHIEIKEVHIDSEKHVTIHVQVTFNARGTTFTYTFFVRVGGDQAYIVRKHESNNN |
| 955 | DKDFEEAAKEVIKRMYEAMNKKDLDKVASLYHPDAQFHYNNQTFDYEEFREWVERMLSTVSNIRFSIKEIRVHGDEVHVTVEVHFDSDKRTFEQHITIVRTGSQWYIVEDRMQTIN |
| 956 | LNPEAEKAVRDTIRRYFEAFNKGNMDEIKSLFDEDWTVQDERTGTEYDLEEHLKRLKELLSNGTQMHVEIKEIRQSDSGEVTIHVTVHVTQDGRTFTVRETHHLRFEGETLKIVRTHLQFRST |
| 957 | PDPNDQEQIKDWLRRYYDALNKGDMDAIKSLFAPDWRDTDASTGQTYDLEEHLERMRQMTSRNVKVEVEIKEIQIDKDGRATVHVTVRMTENGQTFTFHETHHFQKHGDGFQLVETHVHSHGS |
| 958 | PNPEDIEAVIQLIKRMYDAFNAGDMDKLKSLFDDDWRWTDARTGQTFDLDEFLDMVRKMQSQDIKIEVHFKEVRQEKDGTIHVHVEVHVTRNGRTITYDDTHTFQKHGDSWKVVHTQTHERTN |
| 959 | NDPNDEEAVRQILRRLIEAMNKGDWETLASMFDEDWRFHNSKTGRTFDLEEFVRMVRTRHSRGVRIEASVERIEFDHNGRVTVHVTVHMTENGRTRTYHETHHIQKHGDSWKIVETRQTERGN |
| 960 | SDPEDLEQVKETDKRRVEAFNRGDMDTIKSLFHPDAQFTDDSTGQTYDLDEYIDRLRKLFSQGVQVEVHIHRVEQDKDGEVTITATVHWHRNGQTFTVRYTIRYRKTGDDWRIVEVRYQRHSS |
| 961 | TDPSAEEAIRQIIKRLAEAFNKGDLDKIKSYYHDDAQFHFSSTGQTYDLEEFLDMVREMTSRGVQVEVHVDEIRQQDQGEVTVHVTVHFTENGQPFTVQRTLHFRLDGDSWKIVSDHITHHST |
| 962 | PDPNDQEAVKQLIERFYEAINKGDLETLESLLTPDWRYTDASTGQTYDKDEFKDMVRKRFEQNIQIEIHFKRIEVEKDGTVQVHVEVHFTRNGQTFTTHDTHRFQKYGEGWYLVETRSHMRGG |
| 963 | PNPEDQEAIKQIVRRYFEAFNNNDIDAIYSLYAPDSQIHFESTGQQFDVDELREMIEKRLRRGTQTEFEVKEIQVYKDGTVTVHVQVHMTTDGQTFTVDQTITITKDGDDWKIVEHRVREHGS |
| 964 | TDPSVQEAVKELIRRFAEAFNNKDLEALKELYHDDARYRDSTGQDYNKEQIEEILERMMSRIQQMHFSIDEIQQHNDTEVTAHVTFHVTINGTTYTIHSTFFFVRTKDGWKIISEEVHERST |
| 965 | TDPSFQEAIKEFYKEEAEAINKGDVDRWMSLFHPDATYYSSNGQSYDQEELRRMFERMLSTVQRLEFSIDEIQQDDSTHVTVHVTFHFTVNGKTYTVHATDRVQFEKDGVKILERREHTHST |
| 966 | PDPEAQKAIKEAVRREAELLNKKDLDAWMSLFADDATFTDSTGQEYDKEEIREWVKQMLSRAQHFEFHINSIEQKDDTTYTVHVTVHVTIDGKTYTIHMTDFWVVTKDGWKIKRREVRTHST |
| 967 | TDPSDEEAVRQVVQRLVEAFNNGDFDALKELFHPDATYVDSNGQEYNQEQIEEWIRRAMSRIQQIEFSIKEIQQDDHNRVTVHVDFHITVDGEDYTFHMTDFYVKTKDGWKLVRREVHERST |
| 968 | TSEKEFEEMAREWLRRFYEAINKGDLDTLKSLFHPDWTYHNASTGQTYTVEQFLEMVKKMVENNVQIHWEIKRIEISGDEVTAHVEVHITTSSGRTFTVHDTHHFRVEGDRLKIVETRSQYQEN |
| 969 | PSEEEIRQLLRKYMEAIDSQNGHDAVRELYADDATFTYNGRTFKTKEEIAQWYREWLSQHPDMRREIKHLEIRGDTVHVEFTVHFNHNGQTYTVDFRATFRFDHNGKIKEVRIHTHDKR |
| 970 | PSEEEIRRLVKKLLEALDSGNGEDAIREIYTDDSTMHVNGQQFNSKEEIVEWFKRFLSQFPDIHRQVDSLEIRGDTVHVHVTMHVTHNGKKVTIHITSTFHFNKDGKLVEERIHIDNRD |
| 971 | PSEEEIREMLKRFYEAVDSGNGEDAVQKLFHDDATFESNGQQFNSLEEIKEFIQKWASQFPDLHRQIDSIEFDGDTVTVHVTVHFNHNGQTHTVTFHHHWRFDKNGRIVSLHEQEHDNS |
| 972 | SDEDQEEIKRVIEALARALDEGDADAFASFYSDDGRIHFADGSTLTTKEEIKEWVERFKSTNPDAQRHIHSIHFSDGEVTAHVTLHVTHGDKTVTIDVTRHFRFKDGRLKRDEIRWDEKPT |
| 973 | PDQEEIIRTYIRAYVEALNSGNVEEMIDKLYHDDATVHVNTQTFTNKEEVKEWYKRWLSNFKDVKVEPQTNVEVRGNTVTLHFTVHATHGDETKTFHFTYHVRFRGKKITEEHVHENRG |
| 974 | PKEEEIRRTKRKFFIEAFNRGDLERMVRELFHDDATFHYNRRTFKNPEEIVEWFRRFWESFPDATVEDNTHVHFDGDTVTFHFTVHLRHGDKDQTFHFTFHDRYKDNYLVEVRVQTDQG |
| 975 | PKAEELIEIKIKYFAEALNRGRAEDMVRELFHDDAQIHVNNQTFTNREEIIEWFKQWLRRFPDTHVDNDAEFHVDGDTMEAHFTVHVNIGDQTYTFRITVHDEYRDNYLYRTQMHFDTG |
| 976 | PKQEEIIRTFLDFFVRAFNTGNVDKMVDDLYDKDAQLHVNNQTFTTLEEIKKWFREFLKTFKDVQVHNESNVEVRGNTVTVHFTFHATHGDTTYTFTMTSHVTFRGDRIVEEHVHFDSG |
| 977 | PDQEEIIRILLRKLAEAYNTGNIERMLRELYDKDAQYHYNNQTFHTLEEIIKWFKEYFKRFPDVHVELESNVRVEGDTVEAHFTVHVRQGDKTITYRYTRHFRFEGKKITEDRSHEDKG |
| 978 | PDQEEIVKILLRKFVEALNSGNWEEYVDELYDKDVEVHFNNQTYTDKDEIKKWFTEWFSNFPDVKVEIHSNVEVRGNTVTIHFTIHVTLGDKTYTYRVTRHIEFRGKKIYRDQAHFDSG |
| 979 | PDQEEIVRTYLKLFVEAFNSGNWEEFFERLYHDDAQMHVNNRTFNDKEEIKKWFREWFERFPDTRLENKSNVEVRGNTVTFHFTFHVTHGDQDYTYHYTFHVTFRGKKITREQVHEYRG |
| 980 | PKQEEIVEEFLKKFAEAFNKGEIERFIREIYHDDAQFHYNRRTFNNPEEMLEWFRQWFERFPDVHVTLNSNVEVRGDTVTIHFEIHVNHGDRTYTFRYTSHITFKGDKITEEHMHTDSG |
| 981 | PDPKQIKKEMAELLNSGDWKKALEAFERYFTPDAEITFNGETITTLDELKEWIKKWFEDVKDAQVHVDENIEINGDHVTAHVHIHFSGENQTVTATQHDVYKDGKIKRSQDHSQPNN |
| 982 | PSEEELKERVKEWIHREVEALNKGDWEAWKRMFHPGAQFHDNTRQQTFDLDEVTDMIRKQQRHSDVHVEIKEIRIEIKSKDTVTVTVHVQVHEHHGDQTYTYSVTTHFHFEFRGDELYITEKQTQRDRT |
| 983 | PSEEEQERAARDWLRRWFEAMDKGDLDTLSELYAPGAQYTDATTQQTYDKEEFLEMVRQLFENSGVQHHVDSVEIEIKDETTVTVTVHVTVHWHHGDETRTVTITYHFHFRFEGDELKLTHQQTRRHQN |
| 984 | MSEKELEEIARDWVRRFFEAFDKGDMDKLRELYTDDAQYTDARTQRTYDKEQFLKMVEKYLRHTGTAHHLESIEVRIDDETHVTVHVHVTVHHHHGDETKTVHVTSTFHFRFEGDTIKLVEEHVQFNQS |
| 985 | MSEKEREEAIREWLRQFYEALNKKDLDAIRELFTPGAQFTFNGQTFNDAEEFEEWVKKWLSADFQIQIESIEIRINDDGSATVEVHVTVTNRKTGETIRFTDTYFFRFEGRQMKLVRVESRSDQLKD |
| 986 | ASEQEIKEAVRELIRQFYEALNKKDRDKVRELVAPGATMHVDGQQFDDLEEIEEWATELMRQDWELRVKSIEIRINDDGSVTATVHFTAHNRKTGTTVDVTDHYFFERRGDEFKLVRVESHRNQKKD |
| 987 | MSEEELKEAVRQFAQRMYEAFNKRDRDKLDELLTPGWRFESDGQQFDDKEEFKEWVDRMLSNKFHLHVKDMEVRVHSDGTVTVHVTVELRQDDTKRTWTTHDTHHFRFEGDQVKLVETRVSFQPNKD |
| 988 | ASEKEAEEAIREILRQYFEAVDKGDVDAVASYYHDDARYTQAGRNETYNKEQIKEWYERFLSHFDTQRHMKEIRIQFDSKDHITVTVHVEAHHNGSGQTVTFTYHFHMQRDEGEFKITRVQSHNTD |
| 989 | SSEEEAEEAVRRVVRRFFEAVDKGDMDTLRELLHDDWTYHQNDHNETYDKEEFLQMVEQWARRVRVHRQFHGLEIRQSDKDEYTVHVHVTVHHDGTNRTQNVTETHFFRRDRDEWKIIETRVTTTD |
| 990 | MSEKEIREAIKEWVRQWAEAFNNKDIDTIASLYHPDATVTHKGTNQTYDYEEYVRMVEEFLRKFDTRFEIKSIHIELSSEETVTVTVHVTATNTGEGQTFHFTYHFFFRRFDGQWYLLHQREDNTN |
| 991 | TSEEEVEEAVREFLKRWVEAFDKGDMDTLRELYHPDATVHFNDHGETYTYEEYLEWVARFLSNFNLERHIHEIHIENESSTSATVTIHMTVHRDGSGQTFHFTYHFRLRQDSGEWKIVEQHVTTTN |
| 992 | TSDKEIEEAVREWVKREIEILNNKDLDAWASLFAPDATYTQAGTNQDYDYDQMREMVRQYLEKFNAKIELKSLEVRSDSKDSATVTVHIDITEDKSNRTITFTYHFHFRQDDGEWKLKRKQTHNTN |
| 993 | TDKSVEEDIREILKRFYEIFDSGDADKVASLYDEDATFHDSKTGTTYDREEFKERVERQASNDSRHQIDDVRVEQNGDDVRVTVHVTVTFNKDNQQYHSEFTQHFRLRLENGQWKIKEDRLTTKDR |
| 994 | TDPNDEKAIRELKKRAIEAMNTGDWKALKEIFHDDATFHDARTGKTYNLEEYIRMFKELQKFDMRIEVKSQEIEQRGDQIHVTTHMEVHVNHGDQTKTTRVTTHDVYVKENGDWKIAETHYHTDDS |
| 995 | ASEEDQRAIKEVKKQLAEAFDRGDWERLRELLHDDVTFHNSKTGKTYNREEFREMVERFASIPAQRQIDELHIEQRGDDYHVTAHVTVHEHKDNQTKTYRVTFHDVYRKKDGTWKVVRSQEDIDDE |
| 996 | ADPSDQEAIKKILERFYRAMDEGDREALDRLLHDDVQFHDSNTGKTYSKEEFLEMVTEQAKFPLQRQIHGMEITQDGTTYTVHVTVTVHVNHNNQPRTNTFHDTYFFQKKDGQWKIVEVRSTSDHS |
| 997 | MSEKEAQEAAKEVIRQWLEAFNKGDMEALKELYDDGAQVHFASTQQTYDKEEFLEWVKKMFKQDTKMELKSIRIEIDDHNSVTVHATFQLHTNQGNTTITFNIHSTFHLTLENGKWKITEQHITMHQEQT |
| 998 | MSEEEMKEAVKEFKRQFVEAFNKGDFDRMRELIHPGAQFHFASTGQTYDVDEFLDWFRKFFENNTRVQIDQIDIEVKTPTDVTATVHITFHVTHGNTHTTFHVTFHDHYRFKDGQIYLIETHIRTHQRDN |
| 999 | ASEEELKEKVKEIVKRFIEAMNKGDMDAVKSLYHPGARVTFSNTNQTYDLEEFLEWVERLTKQGTKIDLESIHIEIKDETTVTVTVHVTFHTTHNTKHQTFHVTSHMHFQLRDGQLYIIEEHVTTETRDS |
| 1000 | DKREEFKEQIKQLVQRLVESFNTGDRDAFREIYHPGAKFHFSNGRTYDKEEFEEMVEEMHRRDIKLELESLEIHVSGDEATVRVSVTAHNSSDNKTTRFDSTFRFRVGDGEMKLTEEHIHRND |
| 1001 | PEEEEIKEKIKQFKRQLVEAFNKKDLEAIAELIHDGAQFHFYQTQRTYDKEEYKEWVERMLRNNTQIHIESIHIEIKDNGEVHVTVHFTAHRTQNGKNYTIHGTAHDRYRVKDGKLRLIESRIQLHEQPQ |
| 1002 | PEEEEMIRQVREFLRRLMEALDKGDADTIRSLMTDDWTFHDSSQQRTFSKDEFVEMVKKFASNDVKREVHSIRFEIKKDGELTVEVHVTVHATHNGKDYTQHITETHHFRFKDGELRLVRTQVTTHQQPN |
| 1003 | PEEEKMEQAIRELVRRLIEAFNKKDIDKIDSLYHPGAQFHFYSTQRTYDKEEFREWVERLLSFDTQFQVDEIRVQLYDDGTATVQVHVTVHTTHNGKRYQTHMTSHFFMRFKDGQLYILSERIQMHTQPT |
| 1004 | PSISEEQVREWVKKFFEALNNNDPDKLEELFHPGSTVTFPDTGTTLDQEEFKEWVERMLRSAKDSHFQIESLEVRIHGDTATVHVTWTVHFNHGDRTETYTGHTTFHFKRHGDEVRLVNMQVQTDQT |
| 1005 | DEETEIIEDAEEILRRYYDAFNKGDLDTMYELVHPDAQFHDSTGQTYDLDEWFEWLREILEKTDMKIEIKSIEFRIDEDSRTIHVTVHVTVHLTHNGETKTYTVTHHWVLQRRGDSVYVVSVEERRNSH |
| 1006 | PDTEEAKEDIRQIIRRFFEALDKGDMDTLRELVDEDWTWHDNDGQSYSAEEFLEMVERFNRNFNSNHHLESLEIRQKPDQREFTVHVHVKVRFTHNGKNVDVDITETHHLRKKDDEFKIVETHTHPRQT |
| 1007 | NDEEEAKEAAKQIIERLVEAWNKKDLETLDSLFAPDWKWTNANGQTYDREEWKEWVERWMRHFDTKIEIKSIEFRVQPDSRQITVHVTVQVTHTHNGQQRDVTFDETHHFRKFGDSWKVVETRTQPRQT |
| 1008 | PKEEEAKEIVKELLQRFYEAMDKGDMDKLRSLFHPDATFYDSTGQSYDLEEWLEMVRQSTENSDSRHHIKSIEIRQDSDERTFHVTVHVEVHFTHNGETQTYTFEHHWVFVKEGDSVKVIELREHRYNH |
| 1009 | PDEEEAREAVKQTIRRLIEAWNKKDWEALRSLFDEDWKWHNADGSTYDLDEFIDWFRKWQRHFDTHVELKEIHIQIQPDKRHITVTVHLTMHEHHNGQRQTYTYTEHHHLRRQGDDFRIVETHTRPINH |
| 1010 | PDEEEDREDIKEWLKRFYEAIDRGDADALREMIHPDATFHHASGQTYNLEQFLEMVERTRRHSNSNHHLESIEIRLDDDKRQITVTVHVTVHFHQDGRQYTFRFTEHHRFRKEGDSWKLVETHINSNQT |
| 1011 | ASEEEARKAIEEIIRRLIEAFNKGDLETFMSLFDEDWRYHNDSTKRTFDYEEVKEMVKRLLEAGFKLQVDSIEIRQDGNDEFTVTVHVTVTQTHPGTKTVHITEHHRFRYGESSWKIVETRVRRSET |
| 1012 | PSEEEIKEQIRQFDRRRLESFNSGDIDKAVRLVHPDATFRFDSTQKDYDLEEFKKMMEELFRSNTHLQLHGLEVQVHGRTHATATGHITVHFRHPGTRTTHFTYTVTYRYGDNDWKLTHMRVHREHR |
| 1013 | ASEEEIEEAVRQIVRRWVEAFNRGDADEMASLYTPDAEFTHQSHQQTFDKEEFREWVTRMFRAGVEVELKSVEIQIFGDDTVTVHVHVQLHFRHPGTKTVHVTFTFHLRYGESSFKIVRQEIRRHND |
| 1014 | PSTEEAVRELLRQFYESFNNKDWKKIEELFAPDARMHNQSTGRTWDYEEIVEWFKRFASNGHDVQIQIDSIEIQQGPEGHATVHVNVTFHFHHNDRTRTVQVHETHHFRLTKDGWKITRTQIHRVQK |
| 1015 | PSDEEAARELVRKFFEAWNNRDREKLEKLVHPDATFHFPSHQQTYDWEEFIEWLERSAGNNVDAHIEIKDLHVQSTDEGEFTVEVHWTVTFHHGDETKHVDATTQFHFRLTKDGWKIVEVHFTHDNQ |
| 1016 | PSTEEAIREWIKREIEAFNKQDLDTWISLFHPDATMHVSDTNETFDYEEIKEWFSRFAGNNVDVKIQVDSIEVRETDEGHVQVHVHVTIHFHNGDETRTLRFTFTDHFRLTKDGWKIVERHITTDGS |
| 1017 | NSEEESKEIAKELKERFIKAFNEGDADAAVSIVFTPDSQFHDKDGRTYNLEQFIEYLRELLKNDVKIHLHSMEIRVHGNGHVRVTVHVTLTSTHNGSKVHVTVTAHDFYQQKDGTMKIKRSQFHEDSN |
| 1018 | SSEEEFKEAVKETIQRMIEAFNTGDMDKIRELYHPDFRFHHSSGQTFDKEEFLDMIRKLLSQNVKIELKGIEFKEITDTEVHVEAHVTVTNNSTGTTYHFTSHFRIRQDGDEFKITEEHLRTIG |
| 1019 | TSEEEFRKAVEELLKQFYEALNKGDLDKLRELLHPDARFTHDQGTTYDREEFLEMVEELVKAGVRIRITGIEFKEITSEEVTVQVHVDVTNSSTGTTVHVTEHHHIRQEGDEFKIVSTEFRRDS |
| 1020 | YSEEEVKEAVKEWKKRYVDALNKGDMKEISELIHPDARFTHERGETYDRDEWLKMIEELLSQNYHMQIRSIEFKEITEREVTVTVHVEVTNASTGTTYKFTYHDRYRFEGDELKLVELREHTRD |
| 1021 | MSEEEFKEAVKEWIRRYVEAWNTKDLDKLHELYDDDATFHHQDGETYNRDEWLDRVRELLKQDYQIQLLSIEFKEITDTEVHVQVHFQVHNRKTGTTRHMQRHFRFRFEGDELKLQEDHERRDS |
| 1022 | PSEEEAKEAARQIIERLYDAFNKGDLDKLRELMHDDWRYYDSTGQTYSAEEFLDMVKKAKEADVHVQIDSIQVQEVSSHTITVEVHATVHNGSTGTTVHTTDQHHFQLFGDEWKIVETRVHTDG |
| 1023 | MSEEELKEAIEEWKRQFIEAINKGDLDKLRELVHPDARFHHASGNTYDREEFLDRVEKLNKNNFQFDMKSVEFKELTSHEVRVQVHVEVHNRNTGTTFHFTQEDRYRIEGDEVKLIETRETSHG |
| 1024 | PSEQEFEEAIREFKKQWAEAFNNKDMDKLSELIHPDARFDHASGQTYDKEEYLKMIEEMLSNDWNIEVEHLEIKEITERHVTVEVHMTFTNNRTGTQYKVTQTDFYRIKDHEIKLVKSQEHHDG |
| 1025 | TSEEQMEELARRYYTAFNNKDWKAFADLLDPDATVTIFHDGQQHDYDWEQMVEMVKRIAETFKRFRIQIDSIEFRGDTVTVHVTFHWTNDSEDTTVHATHHWVFKDGRLTELHAHYNRQR |
| 1026 | ADEEELRELVKRYAEAMDRGDWEAAARLMHDDWTFHLNNGQTFTTQEEFIRFVQQFFSNADSRHDIKEIRVHGDTVTVHVTVHVNHKTGKTYTIHATEHHEVRNGKIARTQVHEDTQPT |
| 1027 | DSEEQIKELIKEFYRAINERDLDALSELLHDDAQLHLSNGQTFDNKEQIIEWFKRMLDNSDMRVQIDEIRIDGNTATVHVTMHFTHDSGKTVTVHVTEHHRFKDGKIVRTQIHFDSQPN |
| 1028 | PDEEKLRQWKKKFIEAFERGDLEKLEKMIHPGARFHFAEQQITFTDREEFRQWVEEFLERFKNTHIEIKSLEVRGDTVTAHVTVHTTHGDKTQTYDYTTHDRYEGDKLVESRFTFDTKN |
| 1029 | PQEEKLEEWKRRFIELVNRGDLDALKEMIHPGATLHDENTQVTYHTLEEIKKHIEDWLSRFSDSRFQIDSIEIRGDTVTVHVTFHFRHGDKTTTIHMTQHDRYKDDKLTESHTHYDTKD |
| 1030 | PDEEKIKEWVKRFFEAFERGDLDALVELLHPGVQITFSQYQQTMHDLEEFKQWVEEQLKTLEDTKFQIDSMEVRGETVHIHWTVHTTHGDETRTVHVTTTFHFRGDRITEIRFHFDERR |
| 1031 | MSEEEIKDWVRQFMETLDEAFEKGDWKAVKEMFDPGVTIHDDSRKETFTDLEEFARKFFTKYFKNIKDMRREVKEIEIRGDTVHVHWTVHVTHNGKKITIHGTTTFHFKDGKLVEVHFHFHPT |
| 1032 | DSEEEIKEAVRRFYAAMNEAFSKGDADKFKSLFHPGATFHDDSTGTTFTDLDELAERWFREFFETFKDMEIQIDEIRVDGQTVTVHVTVHVTHNGQKITYHVTDHYTFKDGKLVSMRSQWHQT |
| 1033 | PSEEEIKEWLEKFYEALAKGDLDKMRELLHPDATMHIAQSQVTFTDLEEIMEYLKQWIEKAKDTQMDSMEIHFDGDTVTVHVTITVHTPEKTYTFHVTHHWRFKDGKVTEVRETTETRET |
| 1034 | PSEEEIKKFKKRLIEAFANGDLDALEELFTPDVTIHFSSEQVTFTTKDEFKEWVRQFLSQFKDIQLDNMTIHIDGDTVTVHVTITVHTDTQTYTFHWTTHDRYKDGKIVETQFHVETRET |
| 1035 | PDVSEEEIREFLRRFYEALDRGDVDAVVEILDDDWQFHDSSGVTLHTKEEVKEWVERWVKSLPDVRREIHDLHVDGTTVTVHLTVHVNHKDGTHTVHTTDTHHFRNGKLTETHVHWDSRD |
| 1036 | SDVSEEEVKEWFRREFEAFNHKDVDTWVDLFHDDAQIHFSDGETLNSREEIKQWFEKLIRELKDARIQVEDLHVDGDTVTVHYTLHVTHDNGQITVRVTTTVRFEDGKVKEKHVHYDRKE |
| 1037 | ASEEEIKELLKRFYEAIDKGDMDALDELIHPDWTYTDASKQRTFSKEEWKKMVEELLKRSKDTRHQIHEIEIRGQTVTVHVTVHHTHGDETRTIHFTDHHTFKDGKLAHTRTHWHPKD |
| 1038 | MSEEEIKEWLKRFYTAFDNGDADTVLSLLHPDWTYHNSNGITITSLEEFREWMKQWKEKAKRVHRQIDRIEIHGDTVTVHSTVHVHHDDRTVTIHVTDHHTFKNGKLTETRSHVDNGN |
| 1039 | MSEEEIKEWFERYFEALDKNDLDKVASLYADDATVHFQDGITLTNKEEIKRWYKEWMSKVKRTAHEIHEIRVHGDTVTVHVTTHVHHDDRTITVRVTVHVTFKNGKVKEVRFHSDKGS |
| 1040 | MSEEEIKEWLKRFYEAIDKGDLDALRELIHPDATFHFQDGSTITNADEFKKWVEEWFKQVKRVHREIHEIRIDGDTVTVTYTMHVHHDDRTQTRQATDTFHFKNGKLTEFRSHWNNQS |
| 1041 | PSEEEIREIKKQFFEAINNGDMDKVKDLFHPDAQFHIFEGITFDSREEFVTWFTKKIREHFNTKMHLREVHIDGDTATFHYEVTHHHDDRTRTVRVTTHDRYDKRTGKIVESEFRMDTGG |
| 1042 | DDREEIEKLDRQRLEALDRHDMDAFREYIHPDAEMHIHDSSGNTITFKTIDEIVEWFARVLSRYKDSRHEIKSVEFRNGTVTVHVTVTFNHDTGQVHIDVTYTMTYKDGKVTEVHFHYDNK |
| 1043 | PEEEEIKEWKRRFFEALDNHDLDALRELFHPDAQVHFNDSSGQTYTYDTIDEIVEFFARVLSTLKDSRHEIKRIEINNGTATVHVEVHVNHDNGTKTRRVTSHDEYENGRLKRTQFDFDDQ |
| 1044 | DWREELEELDRRRLEAIDRGDMDTLKELIHPDAEMHIEDQSGNQITFKTIEEIVDWFKKLWESLKRVHRQIDRIEFHNGTITVHVTVHVHHENGTRTITVTYTMTYKDGKVTEVHFHYRDS |
| 1045 | MSEEEVREFKKRLAEALDRGDVDAAASLFHPDARFHHNSGETLNDLEEIKRWFREWFSKFPNVHRQIDSMEVNGNTVTVHVTVTVHHPDRTLHYRFTVHDHYKDGKLVETHVHENPT |
| 1046 | PSEEEIKDWVQRFFEIINKTRDWDALKKLIHDDITMHIHNGITFTTRDEIADWWRKWFENNPEIHVEVHVHVDGDTVTVHWHVTVHRGDQQYHYTATTHIRFENGKIAEIRIHIRQWS |
| 1047 | PSEEEIKTWKKRYYEEFFKTRDAQAAAEYIHDDVTIHFNQGITLHNREEIREWFQRWLDNFPRVQVHVEIHIDGDRVEVHVTIHVTHGDRDITYHVTYEDRYENGRLVETRVTINQES |
| 1048 | PSEEEIKELDKQRIEALDNGDADTLAEIFHDGATFYHNDSQSRLNREQFREWVERWFKTFPRVHRQIDEIRVEGDTARAHVTVHLHNPTETITIHVTYEVHYKDGRLTELREHSDQKG |
| 1049 | TSEEEIRRIIKRLAEAFDNKDLDALEEIYHPGATFTSKTSTHDLDLKEWKKRVEEHLSRFKDSRHEIKSIHIDGDTATVHVQAHFHTDSEDITIDVTSHFHFRNGKLTREKQDRDQKG |
| 1050 | PSEEEIREILRRLFEAFDKGDADSFASYYDDGVEFTHNTHTQQFSKDELREWFERWHKTFKDVRHEIEEIRINGDTVTVHVTVTFHHDNRTTHQRVTRHFHFKDGKITHDREHRETRS |
| 1051 | MSQEEIEELLRRFYEAVDKGDLDAIREIMHENATITHDHSTKDYSLDEIVDMVRQFKEKFPNVHRQIDEIRIEGDRAEVHVTVHITTSHEDQTFHVTHHWVFKDGKVVEMREHFEQRG |
| 1052 | DQGTEAIEEWLRRFYTAINNKDADAIFELITPDATFHFHQPQTFTNAEEYKEWFERWVKSAGSYRVEIDSMEIRGDTVHTHVTIHVNHGDKTQTIHVTETHHFKDGKLVETHQHEDERPS |
| 1053 | PSQEEIKEWLKRMYDLLNKGDADALASLFAPDWTYHHASGRTFHSLEEWKKWFEETFKRFEFHIQITGIHIENGTVTVHVTITVTNKDGETRHVDVTDHHHFDKDGRLKETRSHLDEKPQK |
| 1054 | PSQEEIKEWLRQYYEAFNRRDLDKLEELLHPDATVHFSKGRTFHTKDEYKKWVEEFMKTFDFQIHIESIHIENGHVTVHYTVTVTRPNGETYHIRFTDHFRFDHDGRLVSVKSDSDERPQE |
| 1055 | PSQEEIKQWVERFFELFDRGDWEQLAKMLHPDWTLHHYSGQTFTTLEEFIRWYQSFFSNFEFHHELKELHVENGTVTAHVRVTMTSKDGETRHMRVTEHHRFDHDGKLKETHVHVDTKPQE |
| 1056 | PDEEEIRDIKRRYLEAIDHGDWEKAKKLFHPDATITIYHPDGKRETYDLEQMVEMIQRLLKQGDVRHEVKSVEFNGDTVTFHVTVTWHHNGQQHDSTVTYHDVYKNGKITETHIRRDDEG |
| 1057 | PDEEEIEEILRRLYTAINEGDLDKWDDLFHPDATFHEYKKDGSSSTYDLEQWKERWRELQKSGDLHIQIESIHFDGKTVHVTYTVTFHHNGQQYHITYHDTYRFRNGKITEVHSQEDTHG |
| 1058 | PDEEEIERILREHYDAFDKGDMDKVSKYVHPDATFHHYKSDGRTETYDYEQYMELIKQWMKRGNSSHEIKSIEFDGKTVTVHYTVHWTHNGQNHTVTATDHYHIKDGKITEVQSQEDSHG |
| 1059 | PDTEEIERFVRRFIEEVDKSGDADAAKSYYDKDARIDFSGGQTYSLDQFREWVERMFKQGWEVEIKSIEVRGDTVHVHVTMHNRNTGQQVDVTRTFHFRNGKLVKDEIYEDPS |
| 1060 | DEEELRERIKEIKTRFAEAMNKGDRDAIKELLHDDAQFTQSGNTFSLNLDQIAKWFEELFRQDVQVQVDEIHIEIKSKDEVTVTVHVTFHNKRTGSTVTATSHDRYQYTKDGVRLTESRMHSQQVT |
| 1061 | DEEEIKKEVRKILKRFFEAFNKGDWETIKRLMHPDATYVNNGQQYKLNQEQWAEWVKRMNSNNFRIEVKKIDIEIKSKDTVTVRVEWTMHQDRTGRTFHGTTTFHMRRTKDGWKITRVEEHVQEQK |
| 1062 | MSEEEIERIVRDWVRRFIEAMNRGDVDAVVELYHPDATFTDQNGQEYDLEEFRRWVEQMVRANVHIQLDKIDVEIKGTRHVTVTVHVTFHQEHGNQTYHVTSHFHFRLDDGRFYLTRERIETHST |
| 1063 | SDEEEMREHIKELVERFYDAINKGDLDKLREILHPDATFHHANGQTYDKEDFLKWVEELKKNNTHVQIDSIEIHIHGSTEVTVHVHVTFHTEKGNETYKVTETHRFRLTDGQFYIVETHVETHST |
| 1064 | TSEEEAKEEIRQWVRRWYEAINRGDMEKVKRMLHPDWTYHNQNGQTYDLDEFLKMIEELLRNDVRIQIDEIRVQIHGTTTVEVEVHVTFEFKNGGETYHTTDHHRFELKDGRFYLVETRVHMRST |
| 1065 | YSEKEMEEAIRDLVRRFVEALNNGDLDALDELYHPDATFHHASGQTYDKEEFKEMVKELIKRNAHFQLDSVHVQIYGTNEATVEVHVTVHFEHGNETYHFTRHLHFRLEDGRWYLLEDHLQRHST |
| 1066 | TSEKEIKEAVKDIVRALVEAFNKGDMDKIMSYYHPDATFHQYNGQTYDLEEFRQMVEKRLSQGVKVELKSIEIHVDGTTEVTVTVHVTFHFSNGNETYHATRHIRLRLEDGQFKIIEDQEHTRST |
| 1067 | PGEETAERAAREVLRRWFEAFNKGDLDTLRELYDEDAKFTNIKEQQTYDREEFEKMVEEMMRHPFHIEVKSIEFQFNSDDEITVTVHAQVHFHDDPKTYDVTFHFRLRFEGDSWKIVEQRTQRDPT |
| 1068 | PGEETLREEVKKVLKRYAEAMNTKDVDAIEELYDEDARLHIYATQRTFDKEEIKRWYEELMKHDFHVEIKKIDIQVDHNDQVTVTVHMTIHFRDDNKTVHVTAHFHMTYEGDRMKITEVELRHHPS |
| 1069 | PGEETLKRLAKEFLRRLYEAFNKGDLDTILSLFDEDWRYHDTSQQRTFDREEFKEWVERLLSFPFRIEIKSIHFEIKSGDEITVTVHATVHFAHDPKTTHTTDHHHFRYEGDSLKIVETQESRHPT |
| 1070 | PGEEEAEKAARELARRMYEAFNKKDLDKLLSLMDPNAQYTDANRNRTFDYEEFKEWVEEFLKYDFHIQIDSIEAQFHSDDEITVTVHVTIHFRTDPKTVHVTHHWHFRYEGDTWKIVRLQENRQPS |
| 1071 | PGDEEAKKAIKEWLKRFFDAFNNKDLEKIERLVDDDVQFHFAETQKTYDKEEFKKWVEEMLRHDFRIEVKSIEIQADHNDEYTVHVHWTVHFRDDPKTVHVTTTFVFRFEGDDFKLVELRMRSHET |
| 1072 | PGEETLKEQIKEVLNQFFRAVDEGDADTADSYLDEDWRFHNVSQQRTYDREEFREWVERFARIPFHRQIDSIEIQIDHTDEATVTVHVTVHESTDNRTYHVTEHHRMRYEGDTVKILRTHVNTQPD |
| 1073 | PGNETLEEAAKRIVKALIEAFNNKDLDTLSELYDEDAKFTNYSTNQTYDYEEFQDMVEKLMRYDFRIEVKSIHFHFHKDDEITVEVHFTVHFATDNKTINFTSRFVIRYEGDTFKIVSEHVRSHHT |
| 1074 | PEEDERAVRETDKRRWEAINNGDADKVKSLFHPDATFHQSNGTTYDLDEFREMVERLFKAKVQFQVDSMEIRIDDNGEVTVHAHGTAHRDDEGKTVHFTYTIRYRRNGDEWYIVEYRENRDEKST |
| 1075 | NPEDEEAVRQLIRRFVEAFNNGDLEKLDSLYHDDARYHQQNGQTYNKDQIKELLERLMSQKVKFEVHSVEIRILDNGEVTVHVHGTFHFDESGQTTHATSTFFIVRRGDEYYIVSEELHTDNQST |
| 1076 | PGEENLEEEIRQWVRREIEALNKGDMDTWASLFSPDVTFHDQDTGRDFDREEMIEWWERLLKSAKRWRIELKSLEVNVHGDHIEVHVHITFHWNQDSRTITVHVTSTDHFRLEGDQVKIVERHTSTDEKK |
| 1077 | SSEKELKEIAKEIIERFYEALNRNDADTVASLLDEDWTYTQDGETYKFSRDEIKEWVKQMASQDMQLHIDSIEFQIHGTHTVTVTVHVTVHHRHGDKTHTVEVTDHHFFRFDGDEVKITETRSHRRPRD |
| 1078 | SSEKEIEEAIRDWIRRYIEALNTGDLDTLKSLYDEDVTFTHDGNTYKMDQDQIKEWYSQFAKDGTHIQLDSIHIEIRGQHEVTVTVHITFHHNRGDRTETYSVTAHFHFRLEGDSFKIKEVREHTQPVT |
| 1079 | MSEKELEEAVRDWFRKYFEAFNKGDLDALKSLYAEDATITHSGNTYHLSLDQIKDWYRKLLSQNVQMKVDSLEIRINGTTHVTATVHVTLTMHRGNKTQHVTVTYHFHFEFRGDEVKVKRVQAHHHPRE |
| 1080 | TSEKEMQEIVKEVVERFFEALNKGDWEKVASLYDDDVTFTHDGETYKLSKEQVTEWVKKFHSADIQLQIDEIRIQIHGTNEVTVTVHVTMHQNHGDRTKTVKVTSHIRLEYEGNDFKIKEEHEHRHPVE |
| 1081 | DDSEALERKVREWLRRFAEAFNKGDMDALRSLYAEDFTFQDSRTGQEYDLDELLKMLEEMFKNNVQMHVDHVEFQINDDGTITVHVHVTFTNETTGTHVHVTSTFHFERQDSQIKLKREHATHHQS |
| 1082 | DSTKEQIEKIREIIQRFFDAVDTGNWEEIESLYDEDFRFHNSNTGQTYDLEELLRMLRQLTSQGAHHEVKSIEFQFNDDGTVTVTVHVQVHYESQGRTFTVTSHIHFVFEDKQIKIKEEHMTTDEH |
| 1083 | DEEEAREAIKEIVQRYVEALNTGDMETIKELYHPDARIHFYAHNQTYDYEEFIRWVEEFLRRAKDIRIEIKHLEIKDTSDDSVTVEVHVEFHVGHETYTVTSHIRIKKTDGGWRIVEEHVRWHKQ |
| 1084 | DQPEIQEAAKEILRRLYEALDHNDMDTLESLFHDDWRYTEAATQRTFDKDEFKEWVKEWLSRAKDVRRQIDSIEIKETGDDQVHVTVHVTIHVGTHTVHATDHHTFRKTDGGWRVVSTRAHYNQT |
| 1085 | DTPEIQEEIEKLLRRFYEAYNHGDLDALDEMYHPDWRFTEAATQTTYDKEEFKEWVKQWLETFKDTRLQIDSIEFKEFGKDEVHVTVHVTMHVSHQTFKVTDHHTFRRDDGGWQIVRTQTHWNET |
| 1086 | DDKDAEEEVRKVIRRFYELIDSGDVDALRELLHPDWRFHLASRQETYDKEEFVEWLRQWLSSFKDVRRQLDSLEVKDTSKTEVTVTVHFTMHVRHTTWHTTDHHHLRRYPGGWRIVETEVHMQQT |
| 1087 | DTPEIEEAIKELIQRFFEALDHNDRETLKELFHPDARFHAASEQRTFNYEEFLRWVSEWLSRVKDVRHEIHSIEFKDFTKTEVTVTVHWTQHVGDTTVHGTTHIRFVRTDGGWKILEMRVQFHQT |
| 1088 | DTPEMEEQIREVKQREAEALNNHDMEKIKELIHPDARMHVASENRTYDYEEIVEWFERFLRTFKDIQFQIDSLEFKEFGDDEVTVEVHVTVTAGDTTYTVTSTDRYKRTDGGWKLVETTIHIQPQ |
| 1089 | DTPKDEEDVRQTDRRRIEAWNRGDIDKIRELFHPDARMHISATGETFDYEEIVKWFEEVLKKAKDARMEIESLHIVDFGDDQVQVTAHGTVHVGDTTVHFTYTIFYVRTDGGWKIVRVHVTYHQT |
| 1090 | PSEEEIKEAIKDLLRRLMEALDKGDWETADRLYDDDATIHHEETQTTYNKEEFIRRIQERHRRGIRFQREIKSVEIRVDNGDTVTVTVHFQVHEHRGDKTRTLNITSHIRFVFEGSSVKITEEHVTTNQT |
| 1091 | MSEEELREAIKEVIRRMMEAWDKGDWEKLRELYDDDATFHEISTQRTFDKEEYIRRVQELFSRGFQFHHEIKRIEIQINNGDEATVTVHYQVHTTHGDEHRTFDVTSHIRIRFEDSELKIQEEHVQTDQT |
| 1092 | ASEKEIREAIKELLRQFYEALDKGDWEKLRELMHPDAQFHNGSTQTTYNLEEFVEMVQRFASQNIEVHRQIDEVEIQIDDGDRITVRVRVTVHHHHGDETRTVEIHNTDVFQLVGSRFYIVEHRSTTNQK |
| 1093 | PDEEEQREQIRQTVRRLLEALDKGDWETVARLYAPDATITHISTQQTYDKEEFVRRVKRRHDNNVETHREVKSMEIRIDDGDHVTVTVHYQVHHHHGDKTQTVNVTSHIHVRFEDSELKIKEEHVQTDQT |
| 1094 | VHPEDEEEIRQWVRRFYELLNRGDVDAVASLYHPDATFHHQSGRTFDREEFREWIEKFLSQGFQIQITGIEIHQKDGHITVHVHVTVHNSRTNTTYHFTQTFHFRLIGDSWYLLEDHLTTRQS |
| 1095 | VHPEDETAVRELVKRWAEAFNKGDADAVASLFHPDARYHSQTGETYDRDEYKEWVQKFFSQGYQIHLEEIHIEQKDGEITVTVHWRLQDRRTGRTWQIDTHIHFRRFGDDWKITRMEVHTRQT |
| 1096 | VHPEDEEAVRQALRRYYEAMNRGDWQTLRELMDDDWRYHQHNGQTYDLDEFIDWIRKFLSRGYEIHVTSIHIEQKDGEVTVTVHVTVTERQTNRTVNFQDHHHFRRKGDEWKIVRTETTTRQN |
| 1097 | VHPEDEEEIRQWLRRFYEAFNKGDIEAIRRLFHPDARFHNYRGETYDVDEFAKWVKELISQGVRIEIKSIHIEQKDGRITAEVHVRVHHEQTNETFEVTHHWFFVKFGDRWYVVRVEERTHQT |
| 1098 | DEDQKAAEEVDRRRLEAFNKNDMDTLKELFHPDAQMHVESEQRTYDYEQIIERMERRARHFKIQLDEIHVEVKDDGTVTVRAHVTVTQDDTGRTWEVTYTFFYRRKDGEWKIVEVRIRTEPQE |
| 1099 | DQKKQEDQIREWKKRYFEAFNKKDLDTLEDLFRQTPDVRFHFNGTRYNLEQYKEYLERLLSNDVQIEVKSIEIRFDDDDHVTVHVHFTMHESKTGRTFHYTATDFYRFEGEQLKIVETRYHSDTG |
| 1100 | DEKELEEAAREIVRRYYEALNKKDLETISRLFQSSKDAKYTQDGTTYDIEEFIEMVERMMSHDVQFHVESIEVRNDSKTEVTVTVHVQVTDKRTGRTFTVTHHWFIRKEGDEFKIVRVQAHTDTG |
| 1101 | PSEEQQEKVKDWVRREVEAFNKGDMETWDRLFHPDSTFHMSNISREEFIEWFRRFFRTFKDAQMQVDSLEFKDASDTEITVTVHVTVHDDSTKQTWHFTFHDRFRFENGQLKLVSRQVHSQGS |
| 1102 | PSKEDQEKVREWLKRYYEAFNNKDLDKIRELIHPDAKFHISNVDREQYLEWVERFLKRFPDVHMQITSIEFKDQSKDTVTVTVHVQVHDRSTKTTIHSTEHHHFRKKDGQFYLIETQVHTDGS |
| 1103 | YSDEEVKEEIKKWLERFFKALDNQDLEAVASLFSPDWTYHNTDDNKTYSRDQFKKLVEEFLKTFPDVTHQIDSIEFQKNGDGTYTVHVHVTVHFKTETQTFTETHHFEFTKDGWRIVETHHTTVPT |
| 1104 | MSEEEIRQAIKELVERYVEAFNKGDVDALARLYAEDAKYHHASGQTYNREELKEWYERFMSQQWEMEIKSIEIEVKGRTHATVHVHITMHNQRTNETYHVTQTFHFELRGDEFKITEVHTTTHKT |
| 1105 | MSEEELREAVKDVIRRWVEAFNKGNADEVYELYHDDFRFHHASGQTYSRDEFKKWVKEMFDNNFQVTNQSVEIRVEGTTHVTVHVTMTVTQKSTNHTWTFHSTYHIQFEGDELKITEQHTQTDQD |
| 1106 | PSEEEIKEQIKQLVERMIEAFNKGDADLFYSLVHPDWKYHNNNGETYDRDEFKKWLKEAHDAGIQVTNDSLRVEVKGKDEVTVEVHLTFHDSRSNETYHVTEHHRFRLHGDQWYLTRTHAHTNKT |
| 1107 | MSEEELKRAVEEFVRRFIEAVNKNDLEAIKELYHDDFTFTTSNGETYSKEEFIEWVERMVSANLKFDLQSLEIRVRGTDEVTVHVHVTVHDSRSNTTYHFTSTMHFRFEGDELRILREHLQTDQT |
| 1108 | PDEEQQRKAKETVKRWVDAFNNHDREAFKEMYTPDATNSSYGLNYEQIIEFITRILQTFPRVRVHIDSIRVELQPDGTVVRVTVHLTFHFYKDGKQKTVKITYHFQLVFENGSVKIVNQQEHSDDS |
| 1109 | ASEEDQRKIKEVKQRFIEAFNTGDLDTIRKLVHPDARFAAYQVDLDQFIEWVTEVKRQFPNMQVTVDSIEVRADPSGEEITVTVHVTFTTTHNGETHQFRGTYHDVYRKENGEFKLVNSQESSDNS |
| 1110 | PSPEDQKAIKDVKRRYMEALDKGDMDALSELFHPDFTYAARNLDYDEFLEWVKQWLSRFPTARHKIDSMEFRLHPNGEEVTVTVHVTVHHTHNGRHETVTVTAHDVYRKKDGEFKIVRTREQRDNS |
| 1111 | PDEEEQREIKRILEELAEALDKGDFDTFLSYFDKDWRYSAQNIDYEEFEEWVKEYQRRFPNVQRQIDEIHFHLDPSGEEIRVTVHVTVHHHHNGKTDTQTFTEHHLIRKENGSFKFVETKTQTDNS |
| 1112 | PDEEAQRAIKELLQRYFEALDHGDLDTLRSLFDEDWRDSSRNLNLDQFAEWVEKFFRRFPNARHQIDSIEIEQHPNNRTYRVTVHVTVHFNHNGKTKTVTVTEHHVFVKENGSWKIKHTTTHRDHQ |
| 1113 | ASEEDQKAIKEIVERYMEAFDKGDLDTIRELVAPDATYRGLNIDYEELMEWIKRWAESFPDVHREIEEIRVELDSNNRTFKVTVHWTVHVNHNGQTFTVRGTTHIVLEKQDGSFKIKSMQTHVDNG |
| 1114 | PDKEDQEEIKKTKQRMAEALDKGDRDTLRELFHPDFTFKARNIDYEEFIDWVTEWVKSFPDTKREIKSIHIEQVPEGHTYHVTVHLQVHTNHNGKTTTQRYTSHDRYRKENGSFKLIESQVHTDND |
| 1115 | DSEDEQREAVKEVLKRFYEAVDKGDLDTLEKLLHPGARFHDTSKGQTYDQEQFKERVERQVRNNIQREVHVQRIQIDGTHEVTVTVEVHVHEHHGDETQTHTFQEHHTLRQKDDTFKIIETRITSYQT |
| 1116 | PEKELEEAVREWVEREVEAWNKRDADTWASTLDKDSKYHQTDGPTTYDWEELKEMFERTASSDFHIQITSMEVRIIDDTRVTVTVHVQVHQTHGDQTKTVHITYHLHFEFHNGELRLVEKHSTTDEKE |
| 1117 | DPKELEEKVREWIRQWVEALNKRDLETLKSLYDKDSRVHTTSSPQTFDADQFTEWLKKYASINFQIHITSLEIRIIDDTHVTVEVHVQVHETHGDQTHTIRFTYELHFRFENGQIKLVSQRETTDTSE |
| 1118 | PKDEEQAEQIKDVKRRLIEAFNKGDADALSELFHPGAQFHNSEEPRTYDQEEFREMVERAHRNDVKVQLDEVRIQKVDEDEITVTFHLTVHFTHNGQKVTIKITFHDRYRQTKDGWKVVETHVTEDPKE |
| 1119 | PQEDELREQAKELLERFYRAINQGDLKAVADMYTPGWTYHNSEEPRSYSKEEFIEMLKELLKNDTKHHIEEIEVEVKDENEVEVTVHITVHSTHNGQPYTVRVTDTHRFRYEKDGVKIVETHTTTNPTE |
| 1120 | DKEEMEEAVRQLIKRFYEAFNKGNLDEVASLLDEDWRYHSGQQNQTYSKEEFLEMVEKLIKAGTHLHITSIEIHFDDSRGEVTATVHVEIRTTKDGREKTVKTTDTHHFRQENGSWKIVETRVSRDEKD |
| 1121 | TSEEEIREAVKDWVRRYFEALNHGDVDAVASLYADDARLTDASTGQTFDKEEIRDRIEKFFKQSDFRIQVEDLHIEIDKDGGHATVHVHFTIHVTHKNGETRTVHITSTFHFQFEGKELKLKEEQVHRDNGG |
| 1122 | ASEKELREAVREWLRRYYEALNHKDLDKVVSLFDDDWRVDFSETGKTYDKEEYREMVERFMSNSDFRIEIKSIEIRVDPSGGHVTVHVHVQVHVTDKTGRNHTVDTTDTHHFRMEGDELKIVKTEFRFDHGG |
| 1123 | PMSEEEIKEFVKRFYEAIDRKDAETLRRLLHDDATMHVSNGEQYDSLDSIIERWYKKFVSHAERARHEIKEIRFDGDTVTVHVQVHLTHSSGTQTYNVTDHYVFRGKRITEIRSHWNPQE |
| 1124 | PGEEKLKELVKRYVEAFNNRDMDALKSLFAPGWTFHDQSGVTFNNRDEFVEYWLKTLMSRFKEFHMNIDEIRIDGDTVTVHITVHWHHDGETRTQHFTEHHHVRGDKITETHQHFDQRG |
| 1125 | PSEEEIRQLVRRLVEALNNRDWEKFASLFHPDATIHVNGQTYSNAEEAARQFVEKFAKTFPKARIEIKSLEIDGDTVTVHWTAHVSDEPTTFHGTTHIHVRGKKITRMQIHIDSQP |
| 1126 | MSEEQIRQWVREYVEIFNHKDIDALASLYDEDARIHYNGQTYGNYQEAAKKIYSEIFRTFKNARLEIKRLHIDGDTVTVHVTMHVTDQPTTFHMTVHFHFRGNKLVEVHIHVDQHD |
| 1127 | PTSEEQIREWKKRYIEAWNKGDADKLEELFHPDAQVHFGTEGQTFDTLEQFKEFFKKMMSNNSQIEVKEIHIDKSTGRVTVHFTMHVNTDSQTYTFHATSHDRYENGKITEHRTQFDPQ |
| 1128 | PISEEQIKEWLKRYFEALNKGDLDKLKELLTPDWTFHLYAENKTFTNLEEFLEWVKQMLSLNIRIEVKEIHIDRSTGRVTVHVTVHMHTDSQTYTFHATEHHQFENGRLKETHQHVDPK |
| 1129 | SLQEEVEEWVRRWVEAINRGDLDAVASMYAPDATMHVSAEQVTFNSRESIKKFIEKLVKAGFRFEIKEIRIEVKDGTATVQVHLQVHDESTNRTFHVTSHFHFENGKLKEQRTTWNET |
| 1130 | SLEEQARQIVKRLIEAFNRGDMDEIFELYSDDATVHFTHENVTFHTREAIKKWFTELFSQNWHVQLDSMEVEVKDGTVTVHVHVTQTQQDTKRTRTVTSTFHFKDGQLKEEHVRWHQT |
| 1131 | PDEERAKDIVKKFYEALNTGDWETAVRLMHDDARFTVKSENRTYTTKDEITEWIRRFFSQNIRIEIKRIEVETKDGTVTVTVHVTLQDKRTNRTFDATHHWHFKDGRLVEVRQQVDER |
| 1132 | TSEEQMKELIKRFFEAVDKHDMDKLDELVHDDATYHDYRTNRDYDKEELKELIREWLEKATDVRHEMENPDFRFHGDTVTVHWTVHRTQNGQDFTVKATTHFRFTDGKLVELRVREDDKS |
| 1133 | PADEEQIKEWIKRFFEAFNKKDIDALANLFHPDATFHFYDGTTFHSQEEFRQYMEEFFRQFPRTHVQIDSIEFRGDEVHVHWTMTLHKDGQQYHIRYTTTFRFRNGKITEVHFQEDS |
| 1134 | PSEEEIKEFDKQRFEAFDRGDWEAVAKYVHDDATFTHNNRTYPMSRDEFTEWVKRFLRRFEEMHREWDSNIEVRGHTVHVRFTVHFTQNGKTQTVDARYDFKYRNGRLTRVETQRNTKD |
| 1135 | MSEEEIREWVRRFMEALDKGDWDALKKLLDKDSQIHFPESQKTYDLDQFVEWYKRFKRTTDRTQRHVDRIEIHGDTVHVHWTLHTTHQGDTYTFHGTTTFHFRNGKLVEVRFHVDSHKT |
| 1136 | MSQEEVKELLKRFYEALNQRDADKAASLFTPDATVHFFHGSQQDDITSLDQLKEWLRRWLKKFPDTKIEVKEIRVDGDTATVHYTVHQTQGDQPQTMHATDHYHFTDGRIKEVHSRFDPSAFT |
| 1137 | PQEEINKELIKRFMEALDKGDVDAAAELFHPGWTLHHSSGQTWTTKEEFREWVERLQKSLKDVKREVHIHINGSGTVTVHSQVHVTDDTGQTYTIDFTEHHHFEDNRITETHVQTDNQN |
| 1138 | PDEEKIRELLRRYYEALDKGDFDALREILHPDWTFHDSDGTTITTKDEFEEWVREIQSRWKDIKREVHIHINGNGTVTVHVTVHMTHDNGQRTTMHVTDHHHFRGDKITETHAHTHQEQ |
| 1139 | PKEEEMRRQVKEWVERYFEAWNRKDLDAIMSLFSDDWTYRDSRTGRDFDYEEFREWVEQWLRKFEDAKLQIDSITFHIDGDEITVTVHVTITDSSTGRTWHVTEHHHFRFTKDGLQIVETRVQHDQT |
| 1140 | MSEEEIKEIVKRLYEAFDKGDLDLLRELYDDGAEIHFYGQNITITDKDEFTEYVKRLFDNADTAHQVHIHISGDGTHATVHSHYHRTHNGQTHEQTVTSHFQFRDKRITEEQVHFNQN |
| 1141 | PDDTLEEQIKELKRRFVEAFQSRDPDKLRELFHEDVTFQHRHRSTTLGRDEYKEWVKRFIETFKDFRVEIKDMEIRATENSITVTVHVTFTFHHDSETKHYHATYHDEYEYKDGTVQLVRSQSNMHQEN |
| 1142 | PDSDIEEAIRQWFTHWLRAIDEGDADTLKRLYDDDVQFHHDNSTYKLDREQIAQWWREFFSTFKDVRHELKSMEIQSDKDHVTVTVHVTTTFHGDTSTHHFHATYHFFFRFQNGRLFLTRQQEHTQQQN |
| 1143 | VDKDQQEAIRQWLRRYFEAWDKGDADTVASLFDDDWTIEHSNETKNIDREQYREMFESFFRTFKNVQHHMESVEIRADKDHVTVTVHVTMHVTNDDQKQTYHATEHHHFRFENGELKIKHTQTHTNNSS |
| 1144 | DEQKEKIKDIIRKLIEAIDKGDADTAKSLYAEDATVHFSNGITFHSPDEFREWVEKFNKNTNARREFEIHIDDSTGTVTVHVTMHVNQGDQTYTVHMTRHLQFEGDKLREDRIQMHQQD |
| 1145 | DEHKEKIKEILSRFYEAFNKNDADALAELLHDDAQIHLSNGTTFNNKDEFRKWFEEFQSKFNTQVEWRIHVDDTTGRVTVEVQYHTTHGDQTHTADATEHHRLVGDKITETRTHIDQQD |
| 1146 | DEMEEKIRQILNRYYEALDKGDADAIFELLHDDWRMHSSDGTTFTDRHQFKEWVEKFNKEFNSRREWEIHIDRSRGTVTSHVRVTLNQGDKQTHFTVTETHRFRGDRITETRAHYDTQE |
| 1147 | DDEEEIREKLRQWIREFIRAVNEGDRDALKELYHDGATMHHASGRTWTTKEEIAEWFKQFTDQGFRLEVKSLEIQVDTDGSATVHVHVQVHQENTGRTFDFTSTFHFRFENGQMKLQEERIQTDEQ |
| 1148 | DSEKERQEKAKEWVRRYIEAFNRGDMDALAELFWDGWTFHHSNGQTFTTRDEFREWAEKLFSNDVQVEIESIEVQIDDNGRATVHVHVTFHFRRTGRTVTATETHHMEFHNGQLFVRETRAHWHQR |
| 1149 | DSEEEIKEKIKEFVRREIEIINRGDLDAWKSLFTPGSTMHINNGRTFTTQDELKEFIKELFDNQLQFEIKSLEIEIDSDGTATVHVEVEVHEERTGRTVTVRYTDRIEFHNGQMKIVERHITHNQQ |
| 1150 | DSEDEIKEKIKEFKKQLLEAFNKGDADALAELFTPGVTVHHSSGQTFTDLEELKEWMEKFTASGFQMQIDSLEIHVTEDGSATVHVHVTVHNESTNETYTVTFTDHYRVENGQLKITETHIYVHKQ |
| 1151 | DEKEMKEAAEELIRRFYEALNNGDADAAKSLFDEDKAEMHINGQTFNNADEIKKWIKEVFDNNTQLHVHSIHIQTHDDGTVTVTVHVTVTTNGNTTTVTHHWRFQQEDDKFKIVEVHQQTDQR |
| 1152 | ADEELQEQIKEWLKRYYEALDKGDLDTVLSLYAEDATVHNSNGQQVHYDEWVKRYIESLMKRFDSTRREIDEVRIELRGDTITVTVHVTMHFTHNGKHTTVHVTQHFHFKLETSDLKLKRDQVHNDSNSD |
| 1153 | TDEEAQRDIKEWLERFYESIDRKDLDKIRELVHPDATFHNSDGQRVPADEWVDKFYETVVKAFDQVHHQIDSIEIRQDGNTFTVTVHVTVHTTQNGQTYTFHVTHHWHFKKDSKEFKVTHMEEHRQQNKD |
| 1154 | PDQETREAIKEWKERFIEAINKGDMDTLKELVHPDATFHFNNQTFTDREEFAKWVTKMNRDGFRVEVKEIRISQHGDTATVTVHLTFTNEQTGSTMDVTAHDRYRRSNGSWKLVETHFHIQEKS |
| 1155 | ADKETQEAIKELIDRFAEAFNKGDWETLKSLFHPDARVHVDNQQFTTLDEIAEWAQKMFSQNWEVEVKEIHIELRGDEAHVTVHWEFHQQDTKTTVHVTTHITVRRSNKDWKIIRMEVRRNQQD |
| 1156 | TDPSDQEEIKEWKRRFLEAINKGDLDKVKKLVHPDATFHFNNTTYTTQEEIAKWVKEMFDQKWHIELKSMEIQKDGNEAHVTYHVTFHQEDTKTTVDVQAHDRYRKDNGDLKLIESRFHHNQKD |
| 1157 | TDEEAQRAIKDWFRQHVEAFNKGDMDKLASLYHPDATMHIDDQTFTTREEIKKWFEELFRQKFRIEVKSQEIQQDGDEYHVTTHVTLHQEDTKRTSDVTRHLRFRRSNGDWKLIEDRAHRNTKE |
| 1158 | MSEEEIKEEIKQWKRRFIEALNHGDVDAILSLFHPDATFHHARGQTYNREQFKEWLERFASNSDLRIEVKEIRIEIRGDEIHVTVHFQVTNPQTKTTRTFTQHDRYVLSKDLKLTELQTHTHDG |
| 1159 | MSEEEIKEWLKEFFRALDEGDADTVAELLTDDSRLHIESEQVTYNSKEEIREWVERARSTFDAQREVHIHINDDGTVTVHWTVTTHHNGRTHTFDGTTHFHFKDGKLVEVRITVHQRD |
| 1160 | MGEEAAKEQIKEWVRRYVEAFNKKDLEALESLYTDDAQVTFNETQRTYDKDEVKRWYEKVLKADHQIQIDSIEFRTDDDTTFTVTVHMTVTNDKTGRTFRVTFHFHFQRDSSQLQLTHLQVQIDK |
| 1161 | PSEEAQQAVREIIRRFYEAFDNNDLDTLKSLMHDDWTFHNASQQITFKSREEFLEWVKEFLKTFPDLKHEIKSIEIHQHGSTIQVHVHVTVHFGHSQQTYTVHDTHFFQKHKDDYKIVETRSHVDQA |
| 1162 | PSEEDKERIKEVLRRFYEAFNNGDADALASLLHDDATMHSEYNQITFTSKEEIKEFFKEFLKRFPDTEIEIKSIEIQQHGDYYTVTVHVQVHVKAHQQTYRVTHHWVLQKNGDDFRIVHVRERIDQT |
| 1163 | PSEEDQEAVKEWVRQWIEAWNKRDADKVASLYHPDATFTHNNETYDLSRDEFKEWVERWMRSFKDFSLELKSMEIRKSGDTITVQVHITIHYGDNNQTVDVTYHFFFRKENGSYKLIRQRTHRNERKE |
| 1164 | PSEEDKKAIEEIIRRYYEALNEGDMDAIAELFHPDATFHEDNQTFDLSREEFKKRVKEFKERFPDVEVRIDSIEIRQSGDTITVTVHVTFHFGKNNQTYHVTHHWFFEKQNGDYKITELREHRNNANE |
| 1165 | DREEREKQVRDWLRRFFDAVNKKDWKALMDMLAPDWRFHESNGVTLNNKEEFREWFERLMSNDVKIEIKSMEIRVHGDHVTVTVHVQVTHDSTGRTFRVTEHHHFRFTDGKLRLIETRVHHDGGEG |
| 1166 | DTPEDQEEIKQFKRALVEAFNNKDWEKVVEIIDEGATLHFSNGITLTTKEEITEWVRQFLSNDTKIEVKSIEIQKHGDEARVTVHMDVTFDRTGRTFKVTAHDRYKKTDGQLRLVESRFQFNGGEG |
| 1167 | DEEEMKRAAEEFLRRLYDAFNKGDWEALLRLFADDWTMHISDGETYTTKDEFREWVERMLSNTAHFQIDSLEAEVSGNTVTVTVTVTVTHDHTGRTFTFHDTHHFQFTDGQLRLVETRIHREGGEG |
| 1168 | PEEETRRQIEEWLHRFYELLDRGDADALAELIAPDAQYTDTNSNRTYDQEEFKEMVEEFKSKFPDSQHHIKSITFHQSGDEMTVTVHVEVHYNGSNQTVRFTDHYRFRKTKDSVRVVELRSTTDNTS |
| 1169 | MDKEAEEAIERLVRAFMEAMNKNDLETLKRLLSPDAKYHNSDTNRTYDQEEFFEMMERFMRTFKDFRIEIKSMEFEVHGDQIHVTVHWELHLTGSGQTQEFTTHITVDRTKDSFRIVSWTETTHNKG |
| 1170 | ASEEEAKEWIKQWVRREAEAWQNKDLDAWASLFHPDSQVTHSDEQRTFDKEELREIVERILRRFEDVSVEVKSLEIRFHGDDVQVHVEVTFHFSGSNQTRNVRYTDRFRIENGQFKLVSRTVTTDGT |
| 1171 | TSDEEAKEALRQVVRRFYEALDNHDWEAIARLLDDDWTFHNADEGQTYDKEEFIEWVKEWLKRFDNFRHQIDSLEIEKRGDEYTIHVHVTVTFDKSNTQHRTTDTHVIRQENGRWKIVETHMQTDGT |
| 1172 | MSEEEQREAVKDVVRRYIEALNKKDLDALLSLFDEDWTYTNANENQTYDKEEFREWVERFLKTFPDVKIEIKSQEIEFRGDTITIHTHVQVHFAGENQTVDVTETHHLELENGQFKIKRTQTRTDSS |
| 1173 | SEPEQREKVKEWVKRFYEAFNRRDLDELASLVHPDGTFHHNNQTFHLGKDAFKEWVKEFLERFEDVKIEIKELHVEVNGDTVTVEVHVTFHFHHKDRTQTRHVTDHYHFRFENGELKLVSVQSHTDTRD |
| 1174 | PETEEVKEQIKEWFKRYAEAWNKKDWQTLAELFDPNSEFHFAETQRTYDWEQFVEWVQRLLSRASSARMELKSLRIEQRGDTFHVTTHWEVHYSETKETYHATTHLTFKKENGSWKLAHFQIHTQKT |
| 1175 | PEKDEAEEAIRQWVRRYIEALNKKDWKKVADLFHPDATFRDSREQRDFNWEEFVDRVKKLLEHLSSSRIQVDDLHIEQRGDEFTVHVHWTQHRDETKTTFHGTTTLHFRKENGSFQLKEMQTTTQQT |
| 1176 | PEEKEAREKIREIKRRFAEAFNKKDWKTLADLVHPDSTMEDQSTQSEYNWEQLVRIVRRRLESLKSFRVEIDDMEIRAHGDEFTVHVHMTLHRSDTKTTYHIDATDHYRLKDGQVRLVRSTFRTQPS |
| 1177 | PGEEAMEEAIRRIKRRLVEAINNGDWETVLRLFDPNATVHFSKSPQTATTLEQIRRFVEEFLKANAHFEIKSIHIQFDSENTVTVTVHITVHFDNTKTTVDVTFHDFYVRKDGQVKIVETRIQFDHT |
| 1178 | PGREEQEEQIRQMLRRFAEAFNNGDVEALAEMFDDDWTVHFSQSNTTFHTKDEFKKFIKELLSQAWRMEIRSIEIRFDSDNEVTVTVHVTFQNEKTGETVDVTEHHHFRFENGSVKLVETHIQFDHK |
| 1179 | PEEEEDKRQIEEIDRRRIEALNHGDADAVLSYFHDDAEFHYSATNTTLTTKEEIREWFERFISIPFRIQIHSIRVELDGNGQYTVHATVTVTHRPTGTSVTFTYTIKYRRTKDDWRIQRVQIHYDDGGD |
| 1180 | ADPKAQEDIRQWVRRFYEAFNNNDMDALKSFYDEGATMHLWNGQTFHSQDEIKKWFAEMFSSGVRLEIKSIEIHQNGDEFTVTVHVQAHTSHSTYDVTQHFFFEREGDTWKLKRDEIRMHQT |
| 1181 | PSREEIKELLDRMYESLNRNDVDTFVSLFAPDWTLHIYQGKTFTTLDEVKEWVEKWLSDWTGSRIQIDRMEIHGDTVTVHVTQTLSKTGTTVTITDHHTFQNGKLTETHSHEDST |
| 1182 | MSEEEAKEWVKQFYEALNNGDMDAVASLYTPDATYHVWNGQQFDTRDEVKEWFEKYFKSAKDAQIQIDDLHVDGDTVTVHVTQHEGHSGRTFTITQHFEFTNGRLKRDETRRNQQ |
| 1183 | PSDEEIAETLVKRYIDALNRKDIDELASLYTDGSRIHIHNFRGETINIRDKDEYRKVVEKMLRELEDVHFEIKEIRVDGDTVTVHVTMHVTDSSTGKTTTVNVTQHIQFKDGKIVRHEAHFNQTD |
| 1184 | PSEEEIAETVNKRIADAFNRKDLDKLVEIFTPDWQAHITNWTGNTVTFHSLEEFREWAEEWLKRFQDTHIEVKETRVHGDTVTVHMTVHTTDKSTGKTTTINVTEHHHFENGRLVETHIHIHQTD |
| 1185 | ASEEEIRELIRRLVEAFNKGDMDAIKELYDDGATVHFWNGRTFTSKDEIKKWFASMQKDIRLQITRIEVDGDEGTVHVQVHNNSNPKTFDVTSHIRFKDGRIKSERVHMRETD |
| 1186 | PSEEEIKEIIRRFVEALDKGDADAALSILHDGWQLHVYNGQTFHSREEFKKWVESLSKDTHRQIESIEIRGDTVTVHVTVTHGENPKTFKVTEHHRFKDGKITETQIHMNQTD |
| 1187 | MSEEEIRETVKREAEIWNKKDWEAWASLFHPGATMHHSNGQTWTDLEELTRWFQSIDRSVKVQIDSIEVRGDTVTVHMTFHNNKNPQTFHVTVHIRFKDGKITEKHIHTNQTD |
| 1188 | MSEEEIREVVKRFFEALNKKDWEAIKRLLHPGVTIHHSDGRTFTDLEEFAEWVKSLDSNLRIQVESIHVDGDTVTVHWTVHNGKEPRTFRVTTTFHFKDGKITEIHVHRNQTD |
| 1189 | PGEERIKEFLRRLFEAIDRGDMDAIKELFAPGARMHINNQTFTTLDEIRKWFEEMFKSLKNSRHQIDSIEITGDTVTVHWTLHVTHEDGSTVTMRATTHFTFDKDGRLVEMRIHEDQDDR |
| 1190 | MSEEQIRQIVRRLVEAFDKGDWKTLKELYAEDATVHFSKGQTFTTLDEFAEWIRQFASNWDLQRQIDRIEFNGDTVTVHLTVHRHHGDRTITVHVTSTFHFKDGKIKEEHIRWDERE |
| 1191 | TSEEEIKQWIEEFFRAIDQGDAEAIKRLFHDDARLETNRGEEWTTPDEIAEWFKRVWENWDSNHEIKRIEFNGDTVTVHWTAHRNHGDKTVTLHGTTHIRFKDGKVTEMRIHVDEHD |
| 1192 | PSEEEIKEILRRFYEAFDNGDLDTLKELLHDDWQFHESSGRTFTTLDEFLEWVKKVIDNWNTAHHIERIEINGDTVTVHVTVHRHHGDRTITVHTTDHHTFKDGKITRTEVHWDERE |
| 1193 | TSEEEIRETIRRLVEAFNKNDWEALARIYDDGFTFRWSNGETLTTKEEFVRWVQEMIKNSDTKVEIKSIEIRGDTVTVHVQVHTRHGDKDHTVDVTSHFVFKDGRLKEEQFHTDQRD |
| 1194 | SGEDQERIEEWVRRWIEYMFKTGDADTVASLMHPDWTFHLYNGQTFTSLEEFAEWVRQWWSQFPDAHVEIKSVEIENGTVTVHYTVHVTHNGQPYTFHVTEHHRFKDGRLTETHQHRRNT |
| 1195 | SEEDQERIEEIKRRMIEYLIKTGDVEHFASLLHPDAQLHVDSGTTFNSREEMKEWWARFFKNFPDVRVEIKRIEIQDGHATVHVEMHATHNGQKYTFHQTQHDRYKDGRLTESHIHTETR |
| 1196 | MSEEQIERWIRRMFEAWNRGDVDKLVELYTPDVEVHYFHGNETYTFTTLDEIKEWLQQLFERFEFHIQIHEIRTNGDTVTVHVTVTFTHGDETYHMRVTRHFHFKDGRIKEDHIHFDQKQ |
| 1197 | ARREEIERTIRRMLEEVFNTGDADAAASYYDDDAQLHIWNGITFDTKEEIKKWIEEFWKRFPDSKLEIKHVEFTETHVTFHYTVTFNHDTGQIHVDFTSHFEFTNGKLVSERIHSNQRN |
| 1198 | MDESEIREILREMYERLFNTGDADAFASYFHPDATFHFSEGITFTTLEELKEYLRQWYRKFKDVHVQIDSMHITETHVEVHVTIHVRNKDGKVTIHVRHHWRFSDGYIVELRAHFDRKN |
| 1199 | SSEEEIKDIKKKFFEALDKGDLDKLHDLIHPGATFHFAWYQQTINDRSEFLEWVRSLLENADVQHEIKSIHVSGETVQVHVTFHVTHNGETRQYQATVHDRYKDGKLTESRFTTNQD |
| 1200 | PSEEEVKEWVRRFYEAMNNGDLETLHQLLHPDATMHVSRVQITFHDRSEIIAFIKRTLEEFDLSIEIKSIHVGGDTVTVHYQVHTTHNGQTRTVDVTDHFHFKDGKLTEVRSHFNQT |
| 1201 | SRKEEIEEAVRRFFERFIRAFNQNDADQVAEAFDDGATFHAPDGTQFTTKDEIKKWVEEVASQFDGIKVDDVEIHIHDDTVTVQWHITFHHGDETYHIDVTTHITFKDGKIKEFRIRFDNKE |
| 1202 | SEQEEIKRILKDFYEKYFDALNKGDVDKIIEIIHPGVTYWHTSGQTFTTLEEIKEFIERLLSQIRGIEVKNMEIHVNKDKATVHITQTVNRGDRTYHVDSTHHWQFKDGKITEIREHNDQPT |
| 1203 | SQNEEVEELVRQFFERFLRALNTKDADTFLSLFDDDWKFYHKSGRTFTTKDEFKEWFERFASNFDRVEIKDLEIHVNGDTATAHVTFTYTHGDRDFTNTVTEHHHFKDGKLKETRQQRDNQQ |
| 1204 | PFSEEQVREWVKQYAEAVNTKDLDAIASLYDEDATFHHSNGRTFTTREEIKRWYEEFLRQDWQVQFDEIRIEGDTVQVHVTFTNSHDSKSWTATFHFHFRNGKLKEVRVQENQT |
| 1205 | PLSQEEAKEIIKQYVEAFNTGDMDKLKSLYTDDATMHHSNGQTWTTKDEIKEWYERLFSQQWRVQLDRVEVHGDTVTVHLTFQNETDSKTVKYTFHIRFENGKIKEVQIHTNQT |
| 1206 | PGEELIRRILRRFYEALDNKQDELKEILHPGVTYHDSSGRTFTDWREMADWLLEWFRSHFPDAKREIHSIEIRGDTATVHYTIHVNTDDRTITIHATDHYRFENQRLVEVRSHRDQDNNS |
| 1207 | MDEEEIKQLLKRFYRALDEDWRKFASLVHPGATFHFSGLGITFTTHEEFIRWFTEWFRKRFRRTAHEIKEIHVDGDTVTVHVQVHVTHDDGRTQTYDVTEHHRFRNGKLVETRFHFHSK |
| 1208 | DSEDQQKIKELVKRFFDAINRRDLEALRRILHPDAQYHNNNGQTLHTLDEIIEWFKQLMEEFPRAHIEIKSIHIDSSTKTATVHWTLHVTHPDGQNQTIHATTHFVFKDDKITEIHVHENGG |
| 1209 | PSEEELKEWVKQFFRAWQDWEQAFEFIHPDTTIHEHRNGETYTFTNREEIVDFLQKFLSNHNIQIHIHRIEVHGDTVTVHWTLTVNHDSQQYHYSATTHFVFKDGRVTEVRMHIHQTD |
| 1210 | QGKEEIEKIIRRLYEAFNRGNLDEFISLFHDDAQQHTNHPSGETYTFNSLEEIKEWWKRLFDNDTHVEVKSIEIRKDTVHSTVTVTINHNTQTKTMTVHETHHFKDGRITETHITFDDDG |
| 1211 | PGEEEIRRWLRRYYEAFNRGDADELASLFDKDWTFHYQDHNGQEYTFTTLEEYKEWVERLQSQGAQMEVKSIHFDGDTVTSHVTIHITHGDTDHTFDVTEHHRFKDGKVTETHVHTTDRG |
| 1212 | PLEEQIRQWVKRWVEALNNKDVDALASLYHPGATVHFSKGETLTTLEEIREWFERFAKTFKRMHIEIKDLHIHGNTVTVHMTVHLTQDGRDVTTNVTSTFHFKDGKLTEQHVHIDDEH |
| 1213 | TDKEQQEKIKEVVERFYDALNKKDLDKVASLFHPHAQMHISDGYTAHSRDEIKKWFKEWMEKVKDFRIQIEEIRIEGDTVTVHVTVTTHHNGQQYHIRVTEHHRLDHNGKIVETHQHVDNSE |
| 1214 | ASEEEIKEWVKRFFDAFDKKDMEALKELVDEGATFHFYQGKTFTDKDEFAKWVEEWLKRAKDTAHEIKSIEFRGDTVHVHWTVHVHHDGRTVTIHATTTFHFKDGRLTEVRFNLDNQPT |
| 1215 | TSEEEIKEWLRRFYEAFNKGDLDDLHRLFHDGATMHISNGQTFTTREEIKDWFRRVLESAKDIKIEIKRIEFDGDTVTVHYTVTVNHDGKTVHVHATDHFRFKDGKITEVRSRFDQHDT |
| 1216 | TSEEEIKDVKRRFIEAFNKGDLDALASLVADGATIHFAQGETITTKEQFKEYIDRVLKSVGRVHIELKEVRFDGDTATAHVTMHVHRPGKTVTVQATQHDRYKDGKLKESRTQFDQQDS |
| 1217 | ASEEEIEELLRQFYEAFDKGDADRLFELLHPGATVWLWEGTQFNTREEFKEWVKEWFKQAKRVHREIKSIEFRGDTVTVHYTVHVHHDGKTVTTHATDHFRFKDGKIVEVRSHEDTHDT |
| 1218 | PSEEEIRQWLKRFYEALDKGDMDKLRELIDDGATFHLHQGTTFKDKSEIEEWMERWFKTVGDVRREIERIEFHGDTVTVHYTLHVHHPGKTVTIHATDHFHFKDGKLTRMESHFDRHDT |
| 1219 | PGEETIKELLERYYDALDRKDMDALEELVHPGATMHDSNGYTATDREEIKEFWRRLFETELKDSRHEIKEIHFDGDTVTVHVQAHFTHKTGQHFTFDVTHHWVFKDGKIAHLTYRVHQKD |
| 1220 | PGEEHIREWKKRFVEALNQGDYEKLQELLAPDFTYHNSNGYTATTKEEFIRFYQELHKNGFTDVKMEIKEIHVDGDTVTVHVEVHVTHKTGKTYTFHVTTHDRYKDGKLVETHQQWHQQD |
| 1221 | PGEEAIREWVKRFVEALNKKDMDTFKSLYHPGSQMHDSSGWTGNDVESIVEFFKRLFEETYTDVKIEIKEIRIEGDTVTVHMTMTVTHKDGRTVHIDATRHFRFKDGRLTEDRLHFDQKD |
| 1222 | MSEEQIRDFVKKYLEAINNKDVDKIVSLYAPDATVHFSRGETLTSLEEIKEWYKRFLESVGDIHVELKEQRIDKDTVTSHVEIHVTHKDKTKTVDVTFHFHFRGQRLTEVRVQEDDRD |
| 1223 | MSEEQIREIIHRWYKAWNDKDVDKLAELLHPDWTYENNNGERINSLEEFKKWVEEVMSSNGDFRVELKSIHIDKDTVTVHFEVHVNHKDKTKTMKTTDHHRFRGDRITETQVHVNDKD |
| 1224 | MSEEQIKEWIKRYVEAFNKKDVDTLASLFSPDWQYHDSSGETIHSLEEFKEWVKQFMERAKDVRMEIKSIEITDDTATVHVTVTYNHDGKQIHADVTEHHHFRGDRITETRVTFNPQD |
| 1225 | PSEEEIKEILERYFEAWDKGDWEKLLELLHPDWTQHVSNGQTFTNLEEFREYFERFLSRFERSRHEIKRIEFDGDTVTVHVQAHFRQGHQDYTTDVTEHHRFKDGKIVETRAHYDTKRT |
| 1226 | SDREEIKEFKKQLIEALDRGDADAFAELVSDDVTFTFQQGITHTTKDEFAEWVRRWFSSGFDEVRREIKSMEIDGHTATVHVTVHANHRNGQTFTTHVTYHDRYQDGQLTETRASFDTKDS |
| 1227 | PDERIEEIIRRWFEIFFKTGDADKAADLLHEGATVHFHQGITATTRDEIIKWFREFFSTLKDIKFQIEEIRVDGDTATVHWTATVNMNGKTVHYRGTTHFHFENGKIKEVHIHIHQEDQS |
| 1228 | TSRKEAEDIARRYLEEFYKTGDWHAAADYYDDGATVHFAAYQITFKTLEEIIRFLRRLLSRMQEAHVEIKEVHIEDNHVTVHYQLHFTTDGQTQTYRFTSHIQFTNGKIVSERIHMDSGE |
| 1229 | PDEEEIRKLINRYFEAFDKGDLDTLKSLFDEDWTQHHSSGRTFHSLDEFKDWVKKFLSNVETAHEWEIHIDPSGETVTVHVTVHLTHGNRTTTVHVTEHHHFRNGKIVETHIHEQPDS |
| 1230 | PQEERIKEILRQLFEALDRGDADHFASLYAPDATIHFSQGITLTTREEIKEWVKRMNANSEIHREFEIHIDPSGSTVHVHFTVHRTHGDQTHTFHITSTFHFKDGKIKREQVHIQPDS |
| 1231 | PDKEEIKEWIKRYFEAMDKGNVDELLSLFDDDWQYHNSNGETITSKEEFKEWVERWFSNVDTAHEVHIHVDDNGETVTVHVQVHQTHGDKTQTIDITEHHRFKDGKIVETRVHVQPKS |
| 1232 | PAKEEIKEWKRRYFEAFDNGDIDAMAELVHPDAQFHYSNGITFNSLEELKEFLESTFKNTDSKHDFEVHIDDNNETVTVHVHVHLHHGDKTQTIDVTQHDRYKDGKLTESQIHEQSKS |
| 1233 | PDKEHIRTILERLYEAFDRGDADAVASHLHPDARFEFSKGYTITNLEQFIEWVRRFISNTDVHREVHIHIDESGEHVTVHYTVHFNHGDRTQTVHATDHFRFRNGKITRVQSDVQDDS |
| 1234 | PDEEEIKRLVEQFFEAFDKGDLDALASLYHPHATVHFAQYQVTYHSRDEFRKFFEEFWSNFTGSHHQIHEIRVHGDTVTVHVTTTFTHNGQQVDVRVTRHFTFKNGKLVRDQIQFDHT |
| 1235 | PLEEQIKEWKKRFIEAVNKGDMEKLRQLVHPDAQFHFSASNTTFHNLEEFLKWVEEWLKKAKDARIEIKSIEVRGDTVTVHITVHTTHNGQKVTVRVTVHDRYRNGKLVESRFQFDGS |
| 1236 | PSEEEIKDFVRRLFELLDRHKDADLMKKLYAPDATMHVSNGITFNSQDEIKKWFEEFQKKFGFQAQIDSMEVRGDTVTVHVTITMHKDGQTYHVKVTSHFRFDKEGKLKEEHIHEDQQD |
| 1237 | PDEERLKDWYRRVYEEAINKRDPDALASYYAPDAEVHITHNGNTQTYSREEFKEWFERWLKRFPRVHVQIEEIRVDGDTVTFHVTMHFHHNGKQITVTVTYHVTLQGDKIKEEHVQFDNQRD |
| 1238 | PDQEELKEWKKRVIEAIFNQRDADLFKRYVHPDATIHITQNGNTQRFDLDEFKEWFERFLSQFPRIHVQIDEIRVEGKHVTVHLTFHVHHNGKQVTIKQTQHDRYEGKRLKETHIHTDNDHP |
| 1239 | PGEEDIKEWLKEFYRAIDEGDAETLKQLFHPGATVHFQDGETFHDLEEIVKFFQELFKRSRSRHEIESIEIRGDTVTVHYTAHFTHNGQNYTFHATDHFHFENKRLTEMESHSDQRD |
| 1240 | PGEEKLRQLVRRYIEALNKNDLDKLEELYDDGATMHLSDGRTFTTKEEIKRWFEEMIKKSDARFEIKSIEVRGDTVTVHVTVHHTHNGKTITIHVTSTFHVRGDRIKEERVQFDQQD |
| 1241 | PGEEALREWIRRFIEAFNNRDLDKLRELYDEGATLHISEGTTFTTLDEIIEWFERWMKNADFHIQIKEIRVDGDTVTVHVELHVTHNGKTVTIRVTSHLHFKDKRLKEERVQFDQED |
| 1242 | PGEEKIKEWKKRFFEAFDKGDLDKLRELIHPGATFHFSEGTTFTTIDEFLKWVEEFFSNADFRHEIKEIRVDGDTVTVHVTVHVTHNGKTVTIQVTQHDRYRGDKLVESQIHFQQHD |
| 1243 | PGEEKIKKFVERFFEAINKRDLDKLRELFHEGATMHISEGTTFTTRDEIIEWFERFIKNAEFKFDIESIEIRGDTVTVHWTVHVTHNGQTFTIHATTHFEIRGDKIARVEIHFDQQD |
| 1244 | SSEEEIKQWLERFYRALLETNDPDAIASFFDDDATFHVHRGITYTSRDEIKKWFEEWLRSVSDIRIQIEHIEFRGNTVTVHYTVTVHQGDRTIHLTATDHFHFRNGRLKEMESNLNDQQ |
| 1245 | PDEEEIKEWKKRFFEAMDHNDIDKLLSLFSDNVTIHFSQENITLHTREELKEWIERFLSRFKDVRHEIKSIHIHGNTVTVHVKVTFNTNGRTYHVDVTFHDHYRNGKLAESRVQFDQS |
| 1246 | DSREEIKEWIKRWVEAFQKNDVDELLSLYADHVRVTFEAENQTLTTREEIKEWLERFIKRFKNIRVEIKRIEINGDEVTVHMTITVTHDGEQYHVDVTFHFRFKDGKLTEQRAHFSPQ |
| 1247 | PSEEQQKQVEEFVNRYFEALNKKDVDTAASLFDDDATIHFADNITFTSKEQFRDWVEKFLRHSDIKVEYEIHIDSSTGTVTVHWTMHVHHSHSTHTMHATTHFHFRNGRLKEMRTQIDRED |
| 1248 | ASEEQKEQVRQFVERYYEAIDKGDLDALDELLHPGWTYHNSNGRTFTSKEEFKEWVKRWISNMDTAHTMQVHVDSSHNRATVHGQVHVRHDNSTHTVDVTEHHQFKDGKVTHTRAHVDDRS |
| 1249 | PSEEQQTQIKEIKRRLAEAFNRGDVDALYELYHPGATVHDSSGITFTSLDEIKEWLRQFFENLDVNVEFEVHIDSSTGTVTVHFTFHVTHSDRTKTVHATTHDRYKDGKLTESRTHWDEKS |
| 1250 | PSEEQQSRIKEFLKRLYEAIDKGDLDALHELLHPGWQFHQSKGNTFTDREEFREYIKRIFDNSEVHREVHIHIDKDTGTVTVHVTAHYHHDNKTKEVHYTEHHEFRNGKLTSTQQHVDEKD |
| 1251 | PSDEEKIRELIKQFYRAFAEGDWETLMRLLDENWTVHFARHQVTFHSKEEFREFVERVNRNSDIKFEVHIHIDKSTGTVEVHVTFHVTHGDETRTFHTTDTHHFRGDKITETHFNFNTT |
| 1252 | PSDEEKIREWLRQFYEAFARGDLEALFELLSDDVQFHNSAEQVTFNTREEFKEWVKRFLDNSDVKMEVEIHIDKSRGTVTVHVTFHVTHGDETKTFHATHHWHFRDDKITRVEIHINET |
| 1253 | PSDEEKIKELIKAFYEAFESGDLDRAKEIVHDDATFHITSENVTFHNPDEFKEWMKQVLSNSDIKMEIHIHVDRSTGTATVHYTMHVTHGDETRTRDATDHFRIRGDRITEVRSTWNQR |
| 1254 | PHQREKIREWLERYYEAVARNDLDAVFELVSEDATFHYYWEQVTFHTREELKEWLKRLIDNSDTKMEVHIHIDDRNGTVTVHVTFHTTHGDETRTYHVTHHWHFRGDKLKEVHFRINQT |
| 1255 | PSDEEKIREWVRRWAEAWQKGDIETLASLYTDDSRIHYAAYQITFTSREEWKEWVARHLSNVDVKLELHVHIDRSTGTVTVHITFHFRHGDQDKTVHVTVHFHFRGDRLKEQRVHINET |
| 1256 | PDEEREQAKEWVKRFIETWVKTGDADAVEEFYDDDATMHLSNGQTFTNKDEIKEWFKRWIERFKDMQVEIKSIEVTDDTVTVHVTVHTTHNGEKYTFDMTSTFHFKDGKLKEERIQEDDKG |
| 1257 | HDEDRERAIEWVQRMIEMLVKTGDADAAASLFHPDWTYHHSNGQTFTTLEEWKEWVKEWVKRVKRVHVEIKEIRATDDTVTVHVEVTFHHNGKQVHIDITEHHHFRNGKLTRTQTHEHSRG |
| 1258 | PDEDREEAEEIVRRFYERWVKTGDYRVAQELMHPDATFHVWNGQTFTNLEEIAEWFKRWVERFKDFRFEIKSIEFTDKTVTFHGEVHFTHNGQQVTQKVTHHWTFRNGRIVEVRVRRHSTG |
| 1259 | PSEDQRQIEEFVRRWIEIVDKTKDVDAAKSMLHPDWQFHDSNGQTFTDLDEFREWLERWLKRFKDFRVQIDEVRFDENTVTFHVTFTFTHNGEEYHFDVPEHHTFKDGRLVETQVHENDVG |
| 1260 | TSEEEMERVLRRYYEAFNRGDLDALVELMTPDWTYHDETHGITITTLEEHRDWVRKFMERFKDYRFEIERIEFTGDKVTVHVTLHFTDKRTGQTYTVRVTDHHRFKDGKLKETRSRFNEVK |
| 1261 | QDDHQAAEEIIRRYVEAYNKGDMEKIKSLYHPGSTYHQDSGQTFDHEEFLEMVEKRARNTHVQLDHIEIHVKDGTITVHATMTVTEKGSGRTYEFHSTFHMEKKGDTLYIVEEHLHSDST |
| 1262 | PHDQQAAKEAVRRYLEALNRRDVEAVLRLFDDDWTYYDSSGQPYDKEEFKEWLEKYASLNFRIEITTTIHAEVKDGEVTVTIHVTVTWEQTGQTTHMTEHHHLRRDSTGWKIQRTQTHTDNTPT |
| 1263 | PDDHEEIKELVERFLEAFDKGDADTLDKLLHDDWRYHHESGRTFDKEEFKEMVERFASVRVKREIETTIEIHVKDGHATVTVHVTVTFEDTNTTTHATETHHLRKTKDGWKFVRTQQHTDNQPT |
| 1264 | PVDREQAAEVIERYYRAWQNKDIDALRSLLHPGATFYDSTGQRYDREEWLEMVKELLRHTDAQVQIHFDHFEQDGDEIRVTVTVHITYQATQQTYTATHHWRLRLFNGSVKILEVREHTRTS |
| 1265 | MSEEHIRRLVKRYYEAFNRKDMDEIKSLLTDDWRYHNDKTKRTYDVEEFLDMVRKALSTDIEIRIESLEIEIRGDHATVHVRVHITHRQTGQTFTTRDTHHLERGDGSGKFKETRVQFDDGH |
| 1266 | PGSEEEIKELLQRFYELLNNGDADALAELFHPDATFTFEGQNYDLEQFREWVERLFRANVDIQINGNIEIRFDGDEATATVQVTATNKQTGETYNFTHHWFFRQIGNQVFVIRLEIHSDQS |
| 1267 | AGSKEEIKEIIKRLVEAFNKGDLEAIKSLYHPDATFEFDGQTYDLEQYIEMVEELHKNDAKLHINGNIEIRISGDEATVHVNFTITNSQTGETYTYRRTFRFRQQGNDLRIVRDEVHSDQS |
| 1268 | AGSEEEVKDIVRRLIEAFNNGDLDALESLFHDDWTFHLNGQTYDKEQFKKMVEEMFRAGVKIQIEGNIEIEFDGDEVTVHVTFTVHDDRTGTTYTFHETHHLRLEGNRWRIIETRVTTDQG |
| 1269 | DAEEAIKQWVRRYVEAWNKKDMDALESLFDDDWTFHDSDGQRFNREEWKERVKRIQDNTDSQMEVRNSIHIEIRGDTAHVTVYFTVTFHHSHSTHTFSVTEHHTFERENGDWKLKETRTRMHHT |
| 1270 | DDQEAIKEWLKQFYEALDKGDMDALRELLHPDVQFHNQNGEQYDLDEFLKMVEEQNRNSNSKHDIINSIEVRINGDTITVHVTVQVHFHHSNRTQTTNFHETHHFEKKDGDFKLLRTETHSEQT |
| 1271 | AGEEAVRETVRRFYEAWQNRDMDKLRELLDEDWKYHNTATQTTYDAEEWLEWVKQFASFNFRVHIHSMEVRQDGDHYTVTVHVTFTDDHTGRTVKVTDHHHFRRGDGRLKVVETRTHYHTS |
| 1272 | SDQEEIRQWLRRFFEAMNNNDIDALVELFSPDWRFTHSSGTTDNSLEAFRKWVEEFMRRFDDVKIEVKEIEINGDTVHVHVQIHTTHGDKTQTFRVTETHHFRNGKLTETRVHVYDSG |
| 1273 | ASEKQIRDAVREFYRAFNENDLDALMELIHPHAEVTFSAEGRTFTNREEYEEWFRRYMSRFDAKVEIKDMHVQDDGTVTVHVTITFTHNGQEFHVDVTDHYHFQDGKLTRVHSQFDQQ |
| 1274 | TSEEEIREILKRYYESFNKKDVDKAASLLAPDWTQHNAAHQRTFTTRDEFREYFEKFAKRFDAHVEIKSIRIWSDGTATVHVTMTFTHNGQEYHVDVTEHHHFKDGKIKETRVNFDQR |
| 1275 | TSEEEIKELLRRFYEAFDKGDWEKLHELLHPDWRLHVAEEQQTWTTREEFIEWVKEFFKRFNTAHRLEEIRVHDDGTVTVHVQMHRTHNGQTQTFDITEHHTFRNGKMVETRVSFQPT |
| 1276 | TSREEIKQLVERFYEAFDRGDWKALAELLHPDWQMHIGRLNITLHDLEELIEFAKKFLANFDIQRHIESIHISDDGTVTVHVTVHMTHNGETRTFRTTDTHRFKDGKITETHADFDQT |
| 1277 | DQEEEIKEWVKRFVEAFNRGDLDALAELFHDDWTFHHSNGQTFNSKEEFKKWVEELLSFDTKIETKSIEIRGDTAHVHVTMTTNHPGQQRHVQVTETHHFSDGKVTETRVHFGDTQTT |
| 1278 | PSEEEIKEWLRRFFESLDNKDDEFAELLDDNWQYHDSSGNTGRDAKEMIEWLKKWFSQFDTAHHIDRIEIDKSRQTVTVHVTVHQTHKNGQTYTVHVTEHHHFRGKKLTETRVHRNQD |
| 1279 | ASEEQIRQWVKRFVELMNNNDVDALMSIFHPDWTMHVQQWNGQQYDFTTREQLKEWFKRLASLPFRIEIKSLEIRGNTVEVHITIHVNHKSGQTHTHDVTETHHFKDGKLTETHQRWDQK |
| 1280 | MSSEAIEELKRRYIQTAFNTGDADKFKSFFSDDSTMHVYRGITYTTLDEIKEWFERMVKEMQDYHVEIKSIEIRGDTVTVHLTTTVHRGDQTYQMTVTVHDVYKNGRLAHSEFRVDNKE |
| 1281 | SSEENKEFVKRLIEIFFNTRDVKQFLDIVDEDWTFHDSDGSTLTTREEVKKWLEDFLEHFKDAKVKIDEIRAEGDTVTVHMTMHVRHGDQTHTYHITEHHRFEGKKVTETRVRTHPTS |
| 1282 | ASEEEIRDWARRFYEALNNRDRETLHKLFSPDVQMHLADGRTFNSQDEITEWFNQWLEKAKDFRIEIEEIRVHGDTVTIHYTVEFHHKDSTVTIHFRDTFHFKNGKLTEVRSTWDERQQ |
| 1283 | PSEEELKEFLKEFYERLWNTGDWRAMSEYMHDDVTVHYYRSSGETYTATTIEQVVKYFQEFASRFPDVKVTIDSIEVHGNHVTVHITIHATTDNQDFQFHVTHHWRFRNGKIVEVQAHWNQKE |
| 1284 | MSEEEIREWLKRFYEAFNKRDLDKLLELVHPGARFHFSAHGETITDLEEFRKWFKRLLEELQDFRIQIDEIRVDGDTVTVHVTVHVTHEDGRTQTVHVTEHHHFVKDGKLVETRFHFNGS |
| 1285 | PSQEQIEELVRRFFEAINHKDVDKIRELLDDDVRVHFSESNTTFTTKEEVIRWLEEFAKRFKDIRFEIKEIRVHGNTVTVHWTAHFTRDDGRTFTIHATTHFVFKKDGRIVEIRFHLNTG |
| 1286 | ASQEEIKQWIERFFEAFNRRDVDKLISLLAPGWTFHNASNNQTWTNPEEFKEWVERWLKKAKRFRFQIDSIEIRGDTATVHVTVHVTRDDGRDFTYHITEHHHFNKDGKITETRQHINGG |
| 1287 | PDEEIKRWVKEFIEAFQHKDLDALVSMLTPGWTYHDTDGTTYNDPEEFREWVERFMSNADFRVEVHEIRIDKRSQTVTIHLTMHVTHPGSHHTYTATEHHHFRDGRLVSTKEDRDENR |
| 1288 | DQREEIKTWLDRFYESINQKDLDAIKRLYHPDATMHITKEQRTFTTQDEIKEWFERIFRTYPNMRVEIKSIEIRGDTVTVHVTITFTGDGKTFQVTDHYRFKDGKLIEQHSHFNDT |
| 1289 | PEEEELKELAQRFIETVARAMNNGDADAIISLFDDDSTVHFSSEGRTFNSKEEIKEWFEKFASRFEIHIEIKRIEVHDGRVTVHWQLHYTHNGQPYTTNVTTHFVFKDGRFKHFRFQADHS |
| 1290 | SSISEEQIREWLKRFYEAIDKRDRDTFRELIHDDAEFTVDGRTFTNADEFVEQFLRQWISNAQRTQRHIESIEIDDSTVHVHYTIHVTNGHERYQIHVTDTFHFRDGRLVRVQSHRDTKKT |
| 1291 | PISEEQIKEWVKRWVEAFNKGDMDKLMSLYSEGSRFHDSRTGKTYDREEIERLIRQHLSQGIKVQLDSLEIRGDTVTVHVTFHQDQTGRTFHVTRHLQFKDGKLTEDRATWNET |
| 1292 | TSEEQIKQLVERLIEALNRRDIDAFLSLVHPDWTDHQYHKNRSETYDKEEYKELLERMLSKAKDVKFEIKSIHIDGDTVTVHVEFHHTTTENGSEKHRTFRVTEHHRFRNGRLVETHSRFHDE |
| 1293 | ASEEEIKDWLKKWYEAFNNKDLEKLAKMIHPDATFHLTQGNQTRTYDYEEMIEWIERFLKHFKRFHLEIKSIEIRGDTATVHVQLHLHEDKNGSTETHTFRVTHHWVFNNGKVTEVRAQEDPI |
| 1294 | ASEEEAKEWVRRFIEAINRRDLDAIASLYADDVQFHFYHGDRTETYSKEEFREWFETMLRRWQEIHVEIKEIRIDGDTVTVHVQFHFTRTKDGSNETRTYRVTSHIHMRNGRVKEEHIHFHNT |
| 1295 | PMSEEEIKDVKRRLIEALNNRDADKFASLFHPDATLHFSKGETLTTREEIKEWVERFLKQFPTATFQVDSIHIDQSTGRVEVHVTVTVHHDHKTVHIHVTFHDRYDPNGRLKETRANYDEGQ |
| 1296 | PISREEIKEVIRRLVEAFNRKDVDELVELYAPDATVHFYQGETLNNLESIKEWLKQFFRTFKDVKVQIDSIHIDQSTHRVTVHITMHFHHDDRTKTVKVTRHFQFNSDGKLVEDRIHEDHGD |
| 1297 | LSEEQEKAARELARRYVEAFNKDMDELERLYTDDSQMHVSEGITFDTKDEIKDWLTKLAKNARLEIKDMHVEYNPDGTVTVHVTVTVHHPNGTVTVHSTLHFEQRNGQFYLKREHIRWDSN |
| 1298 | DAEEEIKEFLKRFYESLDNGDLEALARLIHDDAEMHVDGGRTFKTKDEIKKWFEEWLKKAKDSKHDIEEIRVDGDTATVHVTVHVNHKDGTVTIHVTEHHEFRNGKLVRTQAHEDPQPT |
| 1299 | TSEEEIREAVQRYYEAWNHKDMDKLLSLIHDDWQNDTYNLTTKEEYKEFVKKFISRFPDFRIEIEEIRVSDGTVTVHVTFHFNHKDRTQTIRTTDHHHFKDGKITRTRQHRNN |
| 1300 | TSEEEIKQWLERYYEAWNKKDLETLASLFHPDARIHSLGITTKEEFKEWVKRFFEQFKDVTVEIEEIRFSDGTVTVHYTVHQTTKDETRTTRYTDHYHFKDGRLTELRSQTDN |
| 1301 | PSEEEIRDWFRRYFEAVNNGDIDALKSLYHPGATVHFSGGRTFKTQDEIREWYERFMRNFNAKIEFEVHVHDNGTATVHFTMHVTHPDGKNQTIDITVHVRFKDGKVTEVRFHEDQS |
| 1302 | PSKESIKDWKRRYLEAIFRSGDADVAKSLVDDDATFHIAETQRTYDADEYREMWRQLMEKIQRVHVKIDRIEIDGDTVTVHVQIHVHHGDQTVTIDVTYHDKYRNGKLTSSQSHNDQKD |
| 1303 | PQQEEIKEVLKRFYESFNRKDLDAIKRILHPDATIHLTHNTTTHTYDLDQYIEWVKRMLENVKRMKIDIHSIHVEGDRATVEYTVHQTHGDKDITMEAHDHVEMRNGKIVEMRSHIDERPT |
| 1304 | DMEEQAKDTIRRLIEAFNHGDLEALKELYDDDATIHINKGDQTYTFSKEEFIEWVEEFLRRAQRARIQLDDLHIDGDTVTVHMTLHVTHGDKDRTIRITSHFRLKDGKIVEEHMHVDDTPQ |
| 1305 | PDEEEIRRWVEEFYEAFNRRDVEALASYLDDDWTYHIQNGSQPQTYSKDDFKRWVEEFMRRAKDFHLEFKDLHIDGKTVHVHGTLTTRHGDQTFHMHTTDTHHFKDGKVKETRATYDEQPT |
| 1306 | PDQEEIKEWLRQFYEALDKGDWEKVKRLLHPDATVHLTHGDQTETYSADEFIEWYKEWKKSASQVHREIHEIRIDGDTATVHYTVHVRFGDKTQTIHATDHFVFKDGKVTELRSHVDERPT |
| 1307 | PSEEEIREWLRRFFEAINKKDLDAIASLFHDDATMHIYRGRTFTTKEEIKEWFERWLRTFKDIQIQIESIEINGDTVTVHWTAHVRDDEPRTITIRATTHVHFKDGKVTEMHIHLNQDDNNG |
| 1308 | GGEEEFKEQIKQFFERYVEATLKGDLDTVKSLFHEDWQYHDNSNQITFNNREEFVKWVEEWQSNVSSTQFEIKSIEVRGDTVTVHVEVHFESNNQTFRVTEHHTFDKDGKLVSTEQTWHQHS |
| 1309 | GGEEELREWVRQFFERLAEAINKGDTDAIRELYTPDSRYHNAATGRTATTLDEIVRFFQQMIKNLPQTTIEIKRLEVRGNTVHVHVEVHHSSTNRTFRVTSTFHFDHDGKLKEEEVHWHEHS |
| 1310 | ASEEEIRQVVRRFFEAFNKKDIDTLVDLFHPGATIHFSKGRTFTTREEIREWFERVFRTFPDAQIEVKSIHVDGDTVTVHWEMHVHHNGKTVTVRATTTFHFKDGKLTEMHVQIHEHD |
| 1311 | MSEEQIRQWLRRFYEALDKKDVDKVVSLFHPGATVHFSKGITFTDLEEIREWFEKWLKTYKDTAHHLESIHIDGDTVTVHYTVTFTTDGKQVHVRVTDHFHFKDGKLTRMESHEDERD |
| 1312 | MSEEQIREVIRQFYEALNKGDLDAVMSYYDDGATMHVYRGITFNDKEEIKRWFEEFLKEFKDIQFHIESIHIHGDTVTVHVTVHMHRNGKTVTIRITQHFVFRNGKIVEDHIHVNEHD |
| 1313 | LDQETAKELVRRFFKALNDGDLDALKELLHDDWTMHYNNQTFNSLDEFKEWVREWAQGWDVEIKSIEVHENPDGTVTVHVHLTTHNKKTGQTYHQTETHHFNKDGKIVETRAHMQD |
| 1314 | SDQEEAKEIKKELIRALNEGDMDAFKELVHPDAQMHVDNQTFNSLEEIVEWFAQFISGTGIEVERIEVQENPDGTITVTVHFTFTDSRTGQTYRATSHDRYSQDGKIVETHFHRQS |
| 1315 | PDEEQQEQIKEWVERWVRLFNTDVDKAASLYDKDSQVHINGQTFNDREEIIKWMRELKQTHIQVKSIEIRLHPDGTITVHVHLEVHYDHQTFRVTTTLHFRKEGDRWKLTHHHTTIDQVR |
| 1316 | TDESEQREIVRQLIRRFYEALNKNWEEAAELFHEGVTMHADGRTFTTADEITEYIKQLFDQDIKIEIKSIEIRFHDDGSVTVTVHVELHNKDGTVSATHHWFFEQRNGQFRLVEMREHRQPQ |
| 1317 | SDEEEIEEDARQVVRRMAEAFNTDMDELKRLYHPGATVHIDGQTFTNLEEIKDWATKLYSNDVKVQIDSIEVQVNPDGSVTVHVHFTVHTKDGTYKVTSTLFIELHNGKWYIVEERVRTQPT |
| 1318 | TSEEEIKEAIKELVERFFEAFNKDWREAASLMHPGSTMHVDGQTFTTKDEITEWIRQLFSNDIKIEIKSIEIQINPDGSVTAHVHWTAHNSTGTVDATTTFFFTQHNGSFRLVEVRFRNQPT |
| 1319 | TSEEEQREIIKEIVRREAEAFNNDRDAWYSLFHPDARFHYDNQTYDLDEVKEMLERAKDQKIQIDSMEVQVNDDGTATVEVHWTATRQGQTYHFTSTLRIEVGEGGWRIVEKHIHTIQS |
| 1320 | PSEEQKEAIKELVHRFVEAVDKDPDAAFEFVHDDWTFHTDNQTFTDREEFREWVARLPEFRREIKSIEIRLNPDGTITVHVHVEVHYPGSTIKGTETHRFRQEGDEWKIVETHAHFQPT |
| 1321 | SSEKEAEEEIKDFKQKLIEALNDGDMDKFESLLDKDQSQYHYNGQTFHTMEEIKEWFTQWLPGWKMQLDDLEVEIKPGGEATVHSTVTMHGPGKTITIHTTDRYRYEGDSWKLVETRTHTDEGE |
| 1322 | TSRKEFEEEIRKLVKRFFEAFNKNDLDKLAELLDKDHATVHYNGRTFTTKDEIIDWFRNYAPGWNIEIKDLEVELKPGGEATVHVTWHATTNGQTYTGRTTIHVRKEGDTVKIIEVRIHIDPGS |
| 1323 | PHPETESQVRDWIRRWVEIFNRGDSFDNLYDDDAQVHFNNRTFNDKEEIEEWFERLLKTFPSHIQIESLEIRQGDGEVTVHVTFTVTHENTNRDIRFHATFHFQKDDSSLRLVEQRVHTEG |
| 1324 | THPSVEEAIRDIKRRMLEAMDNGDSVDNLFHPDAQMHVEDQTFHNKEEIEEWVKRMLESTSMHHQITGMEVRQGDGEVEVQVHVRVTTPETGTTYSFTFHDRYRREDDSWKLLETQIHTDG |
| 1325 | PKPEDEKAARDLVRAMYEAFNRRDSMDGLMHDDAQMTVNTQDFHSKESVEEWFRRVARTFDSTVQIDSMEVHIGDGEVTVHVHVTVTRNETNRDFHFTHTWFIRRDDDSWRIVRVEFHRTD |
| 1326 | PEDEEAAKETAKRYYTAMNTDIDAVRELFHPDFTMHIYNGQQFDTLEEVVEFLKQFIENTTIEIKSIEVRTNPDGTVTVTVHVTVHRKDGTIHVTHHWFIEKRDSRWQIVHLEERRQE |
| 1327 | PSEEQIREMLRQFFRAINEGDLDTIKSLFDDDATVHFARFSVTVHTKDEIKKFFEEMQKRFDMKIEVKEIRIDGDTVTVHWEVHVTHNGQPYTFSATTTFFFVLKNGQLYISRMEIHINPT |
| 1328 | PSEEQIKEMLRRFFEAINRKDLDAIAELIHPDATVHFASHNVTFKDLEEIKEYFEEMMRKFDFHIEVKEIEIRGDTVTVHWEVHTTHNGQQYTYSVTTHFFFRLQDGQLYITEVRVHMNPT |
| 1329 | MGEEAVRDWIRRFYEAFNTDIDKLSQMYAPDAQFHVNGGQQFTTLEEITKWFRELASTTRIQIHHIEVHPNDDGTYTATVHATMHQDHRTVKVTQHFHFQVRGDDLQLIRDEVHFQPT |
| 1330 | PEDEEQIRRFKERVIRAIQTDWEAVRELFHDDSTFELKKTQREYDLDEFTEWVRKWAENASVQLDSMEIHKHDDGTYTVHVTLTTHTRTKTFTIHATDFYRKIGNQWYIIRTTFDFTDD |
| 1331 | PPPEDEKVLRDLVRQFVESMNKGGDRAKELYDDDATMHVDGQTFKTREEIAQWFKEWASTWEIHIREIRIQSNKDTGTYTVEVHVEVRTKDTTVNVTSTFFFQKHPNGQWRLKSEHIHRNQHD |
| 1332 | SEREEQQKQIEEFLRRYYELLDRGDLEAIYELFHPDVRFTDARTGQTFDLDEYKEMLEEFMRRFRHSRHQIDSLRIEQKSETHATVHVTVTVQLEGNSHTQQFHDTYFFEFRGDQMYIVEVRSQTDDT |
| 1333 | SEEEEAREQIKEWFRRYVEAFNKNDVDALASLYTPDARFQDSRTGRTFDKEEIREWYREILERFPDLQLQVESMRIQVDDETHLTAEVHVTIHLPGNETTVHVTYHVRFERRGDQVYITSMHARFHST |
| 1334 | SENEEMERQIREFLKRYYEAWNKKDLDKIYELMHPDVTFVDARTGKEFNLEEFREMVERILKTFPELRFEIDSIRFQFDSKTSVTVEVHVTVHHSGNKKTVRVTHHWFFRFEGDELKVTELRERTHDT |
| 1335 | SEEKELRERAREFLERFYTALQNKDLDAIAEMMSPDVTFQDSRTGKEYNKEQIREMIERWLRTFEDAQVEIKHMEAEIKDKNHITVRVTVQFTTKGNKQTYQFHHEWHFELRGDRLFVVRVQVHIHST |
| 1336 | DLDPEQEKAVREFVKRFYELLNNGDADAVASLLHPDARFHHSSGRTFDREEFKEMVKELKKQGWEVQIESIEIRVESSTTVTVTVHVTVHNQSTGRTFHVTNHDRLVFEGDEVKLVEHRSHMEERST |
| 1337 | DVDPTQQEAVKQLVERFFEAVNKGDLDALRELIHPDARFHHSSGQTYNLDEFLEMVEELFKQGWHIHIHSIEIRVVDKDTITVHVHWTAHNDSTGRQFDATTTFFVTQYGDEWKIVEVRIHIDTKTN |
| 1338 | DADPEQEKQVKEIIERFFEAFNKGDADAVASLLHPDWTYHHSNGQTYDKEEFKEMVKELFKAGAEIRVHKIDFEVKDKDEIEVTVHYQMHNKSTGRTFDVTEHHRFVLTGDKWQIVETRVHIDEKTN |
| 1339 | PDEMEEAVRKTDRKRLEAFNNRDADKFMEVVHPDATFYENGQPQQLSRDEIREWFEQWAKRAKDVHIQLHELHIQIGDDHHATATGHITFTFPGTNRHVQVTYTVHYQFQDGRLFLTEMREHRDSKQS |
| 1340 | DDEQKEKIEEWIRRFYEALNNNDVDAVASLYTPGVKFYHNGQPRDIDRDEFREWVKEMLERLKDVKIEIKSIEIRVGDDTEITVTVHVQMHQPGTGITVDITQHFRFRFEDGRLRILEDREHSDSKQK |
| 1341 | DDEMKEKAEEWKRRFVEAWNKNDLDAFDELFHDGAKIVVDGQEFPLSKEEIKEFIERLIRSAQDAQIHIKSLEIRIDDKDEATVHVHLEMHIRGTNQTVHITQTDRYRFEDGRIKLLESRSHRDHRNS |
| 1342 | DDEAKEEAEKLVRRYYEAFNNNDWKAIKELLHPGATMHSDGQTYPRDQDELVEFWRRTVESLKDVHVQIDSIEIRVGDKDEVHVTVHVTFTQPGTNEHTHVTHHWRFVNTDGRWFIVSVREHRDERKS |
| 1343 | PDEMQEAAKEADRRRIEAFNKGDLDKIASLIHPGATFYHNGQQFDIDRDEFKDWVREMRRRFQDVQIQIHEIRAQVGDDTEVTVTVHVTFTIPGTNIHIDVTYTVRYRRKDGRWFIIEVREHSDSKNS |
| 1344 | DSEKEIQDTIKTIVKREIEAFNNGDVEAWASLYHPDATFTSGNRTENRSKDDIKRFVKQLLSQQWRVELESLEVRVDSKDTVTVHIHVTWKNERTGRTWKATQTIRLEKHNGQWYIVEKKSDRNQT |
| 1345 | DSEKQIQEAIRTIVKREIEALNNGDADTWASLFHPGATFTSGNETQNRDQEDLKEWVERFFSQDWRIKLDSLEVRVDTEDEVTVHVHITFTQDRTKRTYHATFTIFVRKKDGEWKIVRKKSDRRQT |
| 1346 | PSEEDERQLREVVRRYYEAINKGDMDTLRELLHPHATFVHDDQQFDISRDEYVEWVEKFVKNNDLKFDIDSIEVRKIDDTNFTVTVHVTVTERRTGRTYHVTDHYFFRRTEDGRWFIVRVESHTNQNN |
| 1347 | PSKEDEEAIREIVRRLVEALNHGDMETLKELYDEHATIHHDDQTYPLSRDEIAEWIEKWLRNNDTRIHIKSIEIRVRSDKDYTVHVHVQVTNNKTGRTVKVTSTIHLKKRDDGRWYIQEEREHRNPET |
| 1348 | PSPEDEKAIREVMKRFYDAINRNDWDELAKLFHPDARFHHDNQTFDLSRDEYTEWWRKQFESFDLEVRVESIEVRKISEKEFTVHVHVTVTDRSTGRTYRVDETHFLRKDDSGQWRIVETRSHRHQEN |
| 1349 | NPYEEEARDLKRKYVEALNKNPDEFIKLVHPDATFHIEANNTTYKSLEEIRDYVEKQVKNSHVQVHSVRVEVKPNGEVTVEVHATVHHKDGTVDVTQHDRYRMQDGQLYLVETHERMQPR |
| 1350 | MGEENLKEEVKKVLKQMYEAFNKGDWEALLRIMHPDATFHHSNGQTYNSLEEFREMVEELQKHDTQIEIKEIRIQIDSDHTVTVTVHATDTTRSDPTTVTVTHHWFMRFEGDTVKILEVREQFDRS |
| 1351 | MGEEEAKRQIRETIKRFYDAFNNGDWEKLLRLLHPDATFHHSNGQTYNTKDEFRKWVEELLKNNVQIEIHSIEIQMHDETNYTVRVHATMKNSKDSRTIHVTHHWHFRFHGDQLRIVRVQVQFDQD |
| 1352 | KGDEEVEKQIREIKRRLVEAFNKGDWEALARIFHDDFTFHDSNGQTITSKEEFREWFERWQSTNQQIEVKEIRIETKSKDEYTVEVHFKVTNSRSSTTVDVTAHDHYRVIGDNVYIIRSQVHFHQS |
| 1353 | MGEEQLKEQIKEWKKRYIEAFNNKDWEKLLRLLHPDVTFHYSNGQTFNSLDEFREFFERLAKNDAQIEVHSIEIQVHDETEVTVHVRVTDRTGTDPTEVEVRSTDRYTFHGDELKLTETTAQFDQS |
| 1354 | AGEEQIKEQVKEVLRQFYEAFNNKDVDKLLELLHPDFQYHIWNGQTLNSLEEFREYFEELAKNDVQLEIHEIRIEVKDETRVTVTVHVTDHTGQDPTTYHVTEHHFMVREGDQMYIAETRVQVDQT |
| 1355 | PDEERIKEWLKRFYELFDRGDLDALASLLHPDWTFHHSSGTTLTTREEFKEWVKQFLERFENTAHQIDQIDIDGNTVTVHVTVHFHTDGRTVTIHVTDHHRFDKDGKLTETRSHFNQTD |
| 1356 | PDEEEIKEILERFYEAFDRGDMDALFELLHPDATMHISNGETFHSAEEIKEWFERVLKTFGDVRHEIERIEFDGDTVTVHYTTHWHTKDSTTTVRATDHFVFDKDKKIKEVRSHWNPTG |
| 1357 | PSEEEIREIDKQRLDAFDNGDLDALMSYFHPGATFHDSSGQTYHTLEEIKRWFKEFLDKFDVKRTEVRIHVDGHGTVTVHVTAHGTHNGKKIQFHYTYTVHYRNGKITEIHVHIDTQD |
| 1358 | DSEEEIKEIIRRLIEAFDRGDLDALAELYDDGATYHDASGYTATDREDIKEFFKQFLEKFHEQFHHTEIRIHIDPNGETVTVHVTVQVHTKDQTYTYRVTSTVHVKDGKVVEERVHINQEN |
| 1359 | PFEEEVKDLKTKFLEAINRGDVDALVELLTDDSTVHFTMYQITITSKEEFRKWFERFWKTYNAHFDISDVKIQIHGNEEATVHFTVHFRHGDRDITVTVTVHDRYVNGRFKRTRIHFNPHE |
| 1360 | PTEERIKELLKRFYEALNKKDLDEIASLFHDDVRMHNQSNNITYNSKEEIREFIERLLSADFKIEIKEIRIDRDRQRVTVHVTMHRNHNGQTYTFDVTHHWQFKDGRIVEVRHHTRQRT |
| 1361 | PDQEQIKEWLKRYVEAWNKGDLDALVELFHPGWTMHLSNGQTFHTLEEFREWVKELLDKFQDTQVEIDSIHIDQSKGRVTVHVTYHHNHPGQTRTAHVTEHHQFEGDRLVETHFHVDQKG |
| 1362 | PEKEIEERIREWIKRWYKSWNDRDVDKIISLLHPGWTYHHSSGQTFTTLEQFREWVERLMKNADFRIEIKKIDISGGTVTVHVQMHWTHGDKTTTIDVTEHHHFRNGRLTETRAHYTSSPKD |
| 1363 | PEEEEKQKIKEWLKQFYDALNNKDADAIKELVHPGATMHIADGITFTSRDEVKEYVKRIADNADIRLEIKEMHIQDGHVTVHVEVHEHHGDTTYTVRVTHHWRFKDGKLTEVREQTDRQPHS |
| 1364 | PEPEEQEKIKEWVKRYVEALNNKDVDALASLYDDGATVHFANGTTFTTREQVREWYERMAKNSDMRVNLESLEVRNGHVTVHVTVTFHHGDKTTHIRITVHFRFENGRLKEVRFHWDSQPQS |
| 1365 | PGEERIRELAKRFYTAINNNDLDTIARLLTPDVEVTFASEQRTFHNLEEVKEWFQRFIESNPRFRMQIEEIRVDGDTVTVRYTVHVNDKRTDSTYTTHAQDHFHVKDGKITRVTSNRDTHQT |
| 1366 | PGEETIREWVKRYIEAWNKKDLKTLLDLVTDDWTLHLGSYQITFTTREEYKEWVERWMKTFPDFRIEIKSIEIRGDTVTVHVQIHGTNKDEPKTFTWDVTEHHHFKDGRITETHMDFDQKET |
| 1367 | PGEEEIRKWVKRFVEAFNKRDADTLFELVTEDWTYHAAGQQITFTNAEEFKKWVEELLRTLSDFQMDITSIEVRGDTVTVHVTVHMRDDRTPKTVTTHITEHHHFRNGKITETRATWDTKDT |
| 1368 | PSQEEIEEIDRQRIEAFNRRDADAVASYFAPGAEIHLSNGQTFTDLEEFKEWVERFLRRFKDIHIHIHEIHVNKDTVTVHMTVHFTHDNGQTYTMTVTYTIRYDKDGRITRMQVHVDEKR |
| 1369 | PSEEQIKEWLRQWFEAFNNNDWETLASLYDDGATMTHYRGETFKDKEEIIEYIKRFLESMKRMRMEVKEIRFNDNTVTINVEVHVTHETGQDVTVHIQFHFRFDKDGKLVEQHTRTDQQN |
| 1370 | PDESQIREWLRRFFEALDNRDLEELMRLFDDDWTMHIYNGQTFTDRDEVKKWFKEILDRMKDFRHQIESIHFTEETVTINVTVTVNHDNGQTFHIRVQEHHRFDKDGRLKETQFREDQQD |
| 1371 | PPELEEQIKEFVRRFIEALNRNDLDAVAEILHDGWTMHINNQTFTTKEEVRKWVEEFLKKNKDLRIQIDSLEIRGNTVTVHVTVHFTHNGRTYDVSVTEHHRFKDGKLVETHVQRDQIH |
| 1372 | MSEEEIRDWLQKFFEAIQNKDLDTFKRLITEGVTFHFSAEQKTFHDPEEVVEWFERWMRTFPDHRVEIHSIEIRGDTVTVHWTMHVTHNGQTYTIDVTTTFHFRDKKLVEVRFHFNERR |
| 1373 | MSREQIERFVRKLVEAFNRKDRDAFEEVYSEGSTLTSDSTQQTFHNKDEIVEYFKRLADAFERFRVEIKEIRIHGDTVHVHLTFHFTHNGKDVTFDVTSTFHFRGNRLVEEKITVHERR |
| 1374 | PTEERIRELLKRFYEAWNKKDLDKLVSLFHPGATIHSSEGITLTTQEELREYIERVMRRWKDTRIEIEEIRIDGDTATVHVTTHFHTNSQTKTVTATHHWVFQDNFVVELEERSNEH |
| 1375 | PDQEDITEWLKRFFEAWNKKDLDTLVELFADGSTYHHADGITVTTKEEYKEFLRERFERAKDTQIEVKSIEIHGKTVTVHWTMHLTSNSQRHTVDVTTHFVFRGKRVTELRQHFNQK |
| 1376 | DLREEIERFVRRLFEAINKKDLDALKEIFHPGWTFHLSQGTTFTTLDEFREWVREVQERFKDTQIQIHEIRIDGYTVTIHVTVHFHSNSQTKEVTVTEHHHFKDHKLTETHQHHNEK |
| 1377 | ASEEEIKQWVERWAEAFNKKDLDELARLFHPDSQYHDQNGETLTTKEEYREWYERLMRSLKNFHIEVKSVEIHGDTATVHWQMTTHRPDGQQYHYTATTHFQFKDGRLTEVRQHTDGT |
| 1378 | SSKDEIKEAVERFYDAFNKGDVDLLASLVHPGATFHDSSGETLHSKEEFREWVKRFLDEMEDTKFEIKSIEIRGQTVTVHFRLTVTHSNGETRDGTYTDHYHFKDGKLVEIRSHEHGE |
| 1379 | PSEEEIKEFANRFYEAINQGDLDAIMRLFHPGATFTVNEGTTYHSKEEIRKWFKEFFERVKQIHIQIHSIEIRGDTATVHGTVTVHHEDGRQQDFTVTHHWHFKDGKLVRVEERRHGS |
| 1380 | PSKDEIKEWLERFYEAIDKNDWEALERIIWDGWTFTDSSGQTWTTRDEFREWFETMVERFKDMRHQIDSIEIRGDTVTVHVTATFHHESGETRTQHVTDTHHFKDGRITRTRSHRHSS |
| 1381 | PSKDEIKEWLERFYEAFNQKDLDALDSLVDDGWTFTHSSGETLTTREEFRKWVEQFLREVQDIHIQIESIEIRGDTVTVHVTVTVHHKDGRQQHMRVTETHHFKDGRITETRQHIHGS |
| 1382 | PSEEEIKDIKRRFAEALDNNDVDTAASLFHDDATVHFSKGETLTTKDEIREWIERWASRFKDTAHEIKEIRIDGDTVTVHVEVHFHHKDETKTVRVTVHDKYKDGKITRSQFNYDEGG |
| 1383 | PSEEEIRDFIRRLVELLDSGDADAVASLYDDDSRVHFSEGETLTSREEIKEWVERYFKSLGNVHREIKRIEFDGDTVTVHVTVHIHHNGKTVTVHVTRTFHFKDGKLKEDHVHIDNGG |
| 1384 | SDEEEVKEIKRRLVEAMDKGDWETLARLFHDDAQFHFEATGTTFHDKEEFIRWFQQFVSNAEIHRQVHIHFDGDTVTVHLHVTVTHGDQTHHVTATVHDRYKDGRLTESRFTFDPRE |
| 1385 | SVSEEELREWLKRFYEAFQKGDIDALKELIHDDWTYHDSSQGITFTTKDEFREWIKELFEKFDFQIDSMEIHVHGNTVTVHVTVTVHTKDKTKTIHVTDTHRFKDGKLTETHSHVDEKET |
| 1386 | SISEEEVKEFIRRFLEAFEKGDLDALAELFTDDWTVHFEYSGITFHTLEEFKKWVKEVLEKWEYRVDSMKIDVHGDHVTVHVQVTRHHPGETQEFTYTEHHRFKDGKITETRFRRHQHDT |
| 1387 | QISEEEVKEWVRRFAEAFQRGDVDALISLYTDDATIHFESEGRTFTTKEELKEWLTQLFRRAEFHVDSIEIHVDGNTATVHVTITATQPGRTYTYHVTSHFRFKDGKLKSERVTIETRGS |
| 1388 | QISEEEAKEVVRHLIEAFQNGDMDALMSIYTDDATFHMASEGRTYKNKEEIKDWFRRLRESADYQFDEVEIHVDGNTVTVHMTVTVHHKDKTVQQHYTSHFRFENGKLKEEHVHVDTRET |
| 1389 | SISEEEIREFLKRFFEAFQRGDMDALKRLMHDDATVHFSSEGRTYHTLDEIKDWFRRVWESAEYHFDEIEIHVHGDTVTVHVHVTVHHPGETDHITYTVHDHYKDGKLTRRQVHIERRRT |
| 1390 | PISEEEVKEWIKRYAEAFQNKDLDAIMSLYTDDATVHFASTGTTFETKEEIRDFYRKVLENADYQFDEIEIHIHGSRVTVHVHVTVHHPGKTVKITITMHFQFKDGKLKEVQIHVETKQT |
| 1391 | PEQQEKIKEFLKRFYEAFERGDLDAMFEMLHDDWRFHYEYENITFHNREEFKEWAERFMKRFEFQVHMTIHVDTDNTVTVHVTVHTTSPDGQPYTFHTTDHHRFRGDRLIETRVHVRQET |
| 1392 | PEDREKIKEIVKREVEAFQRRDLDTWAELVHDDARITFQYENRTFTNKEEYKEWLRRFMETWEFRVEVTIHITSSHTVHVHLTFHVRHPSGQDHTFHVTVTIHFRGDKITEKHFQWHQED |
| 1393 | PEDRERIKEWLERFFRAFANGDLDALKELLTPDWQFHYEPQNITAHTLEEFKEWVERFIKQFDMRVEIHIHVSDSDRVTVHVTLHVTHPTGQPQTYHITEHHRFKDDKITETRVHVDQQE |
| 1394 | PEQREKAKQTLERFFEAFQRGDMEKLERLLHDDWTFHWEQQNITFTTKEEYKEWVRQLLSHFDVQFEIEIHISDSNTATVHVTIHWTHRSGQKRTIHVTEHHHLRGDKITETRAHIEQKE |
| 1395 | MSEEELREWLRRFYEALDRGDADALASLYDEGVTIHISEENRTFKNKDEFREWFRHWFSNTDTAHEVHIEIKDDTTVTVHVHVTLHHKDGKTVHITVTQHFHFRGKKITEDRAHIDTKET |
| 1396 | TSEEQIREFLKRAYEALNRKDLDAFAELFTPGWRYYHAEENRTFTDKSEVREWIRQYLEKTDAKIEVHIHVDDDTRVTVRVTVHFTTKDGKKQTVHTRDHHHFEGDRITETRAHYDTKDT |
| 1397 | AHEEKIREWLKRYIEAVNRKDLDAVISLFHEGWQMHHANGITFHTRDEVRKWFEEFLRRFPRVRVEIKSIEVTTDTVTIHVTVTVHHDGQTIHIDVTEHHTFKGDRITETRIHIDEKPT |
| 1398 | PDEEEIKRILKAFYDAIDNGDMEKIKELMHPDAQLHNSSQGITWHDLEEIAEWFARFASLRNTAHEIKRIEFDQDHVTVHYTTTVNKNDQTYHFNVTDHFRFKDGKITEVRSHIQGE |
| 1399 | PSEEEIKEIKKRLLRSVDDNPNDMDWFKKVFDKDHVTMHSDNTTMTTADEIVEWFQRQFATNNSKRELKSLEIRGDTVTVHVEVHETRTGRTFTVTYHDQYKDGKIVSTTAHRDST |
| 1400 | SSEEEIRQWLKRFYEAFDRGDADALKEIVHDGWTLRSYNITDKEEFKEWVERWFSQFPQMHRQLDRLEVEGGTVTAHFTVHFTHNGRTFTMHTTDHHHFKDGKLTSTQQHTDEQPT |
| 1401 | PSEEEIKEIDKRRLEALDRGDMETFKELVHPHAQMHVSEGKTFDTRDEIAEWFERFWKSFKDMRRHIEEIRVENGTVEVHVTVHFTHDNKTTTVHITYHVRYDKDGKILSMQFHRNQTSD |
| 1402 | PSEEIARQIKRRFIEALDRGDADAIAELFHPGATFHDSSGRTFTTKEEIKEFVERWQSQFQDSRHQIDNVHFDKDHVTWHVTQHFTHNGQTFTVHVTVHDRYKDNRLVETHFHHNHS |
| 1403 | SSKEEIKEWLKRFYELINRHDLDKIAEFLDEGWTMHIESEQYTATNKEQVRKWFEEFMKKVERIRIEIEEIRIDDNTVTVHVTMHVTHNGQTQTYHVTEHHHFKDGKITETRQRVHTG |
| 1404 | MSEEQIKEWLRRMYEAIDNNDLEALMRLFHDGWTMHIESQQVTFKDKSEVKDWFRRYLESVKDTAHQIDSIHISDDTVEVHVTTHENHNGQTYTYRVTETHHIKNGQFKETRQTVDTG |
| 1405 | MSEEEIKDWVRKWAEALDNNDLDTLASLYDDGATVHFQSEQRTFNNKEEIKEWVERWLKTVKDSQHDIDDLHIDKDTVHVHFTVHLTHNGQDHTYHVTSTFHFKDGRLKEERIQVHTG |
| 1406 | MSKEEIKEWIKRYFEAINRKDADKIVSLFHPGWTFTNESQQITFEDQSEFKEWVERWLKSVKDIHVEIDRIEIDKDTVTVHFTVHVTRNGQDHTFHATEHHHFRNGQLKETQLQIDTG |
| 1407 | DREEAEKAIEEWVRRFLTALNNKDLDKVLSLLDDDWTYHDSSGNTYTTREEVEEWVREFMSQNWQITYQDLHIQQHGTHTYTVTVHVQYHDKRTGRTFQVTEHHHIERQPDGSWRVVETRVHTDNE |
| 1408 | DELEEFKRRAFKAIIDTNDWDKMAKYYHEGATITVNNETRDLGREQLVEWFRRFLSRVGEMHWQIDRVEVDQDHVTVHLTVTFTHDGRRVTVRVTEHDRYKDGKLTSSNQHRDQDDS |
| 1409 | DELRELKKKFYEYIVNTRDLDAVKEYFHPGATITEGNRTETKDQDQIVEWFERWWSRVGQAHHEIKSIHVSDNHVTVHVEVHTTHNGKKITFRVTQHDRYENGKLVEMHVHVDQDDT |
| 1410 | PGDESKIKDIVRKMYEEAFNSNDWKAFEEAVTPDSTMTVQNGQTFTTLEEIVRWFQEFIKTFKDIRVEVDSIEVRGNTVTIHVTVHAHHDNRTITFHATHHWHIENDRFTEVHSRWNQKD |
| 1411 | SSEEEIRQLVKRFYESINNNDVDAAASLFHPDATMHISQTGQTFTTKEEIRKWFEEFLRSVSDIKVEIKSMEVRGQTVTVHVTITVNHGDRTVHMHATHHWTVKDGKITEMREHVDRQPD |
| 1412 | ASEEEIREIIRRLLEAMDKGDMDALRELYHPDARFEASETGQQFDTLDEIMEWFEKWHKSVGEVHREIKSLEIRGDTATVHVTVHTTHGDKTYTTDFTSHFRFKDGKITEEQLHVRTQPT |
| 1413 | PSEEEIEEILRRLYEAFDKGDWEKIASYMHPDAQMHISQTGTTFDTLEEIIEFVERFFKEAGDVKRQIHSIEIRGNTATVHSTVTHNRGDQTFHMRATHHWHFKDGRITSVKEDVDTQPS |
| 1414 | PSEEELKEWVKRHLERIFNSGDWNAAKAMFHPGVTVHVYNGQTFKNPEEIAEFIRRFIESFKDVRLEIERIEVEKDTVHVHWTAEFHTDTETVHIHGTTTFHFENGRLKEVHIHLRQTN |
| 1415 | PEFEEEVEEWVRRMFQAFFRTGDWRALEEAFHPDAKVTWARGEQTYDQEEFIRWFTKMMSRFTNAHFEIKEIRVDGNHVTIHWTVTFHSPTQTFTMHGTTHFRFKDGKLTHVRFEIHQDDGS |
| 1416 | PISEEQIKEIVKRFYDAWNNNDVDKLVSLFHPGATFHFWNGITATDLEEFKEYVERFLSNFNTQAQIHNMEIRGDTVHVTYTMHRTHNGKTVTLEATDTFHFKDGKIAEYKSDVDDKD |
| 1417 | PISEEEVKEFKKRFIEALNKNDLDELKELFHPGSTFHFADGETVTTLDEFKEWVERMFKNFNFEFHVKEIRVHGRHVTVHVEVHFTHNGQTFTIHVTVHDTYKDGKITHSQFDIDQTD |
| 1418 | PVSEEQIKEVLKRFYDAINNGDIDAIVELIHPGATLHFSKGITLTTLEEIRKFFERTQKRFNTKIEIHSIEIRGDTVTVHVTMHATHNGQPYTYRVTHHWRLQNGKVAEVHHQENDTS |
| 1419 | PEPEEIAEELVRTIEEAMNKGDVDKMLSLYAPDATVHFSNGQTLTTREEIKRWFEEFFSKFKDVQVEVKSVEVNGDTVTIHFTVHTNHENKTTTFHITSHFHFKDGKLKEERVHIDQEET |
| 1420 | PEAEQAVRDFVRTFLDAFNRGDVDAIASMYHPDATMHLSNGQTFTNLEEIKEWFRRWFSNAKDVHIELKSVEINGDKVTFHFEIHVNHEDRTVTFDVTSHVEFKDGKIVSEQIHTDQKQS |
| 1421 | PEDQERIEEILRRFYELFDRGDMDRAVDEAFDDGATMHLAEGQTFTTKDEIKEWFRRLWSTIKRLHRQIERIEIRGDTVTIHVTVTVHRDNEQIHMRATHHWTFKDGRITEVHSHTDQHN |
| 1422 | PKERQDRITEIDRQRAEAWNRKDLDAVMSYVHPDATFHFAETNTTYDREEFREWVERVLKTFPDMHVQIEEIEVRGEHVTVHSTVHVNTPTKTRTIRVTYTVRYKDNRLQEMHVHTDTEDQ |
| 1423 | PEEDERRIKDLKKKEVEAFQNKDLDKVMSLFHPDATFHFADRGETYDYEEFREWVERVLKTFKSIQVEIKEIRIHKDEATVHLQFHVHTDTKTHTVDVTVHDRYEGDKLTETQFHTDQKHS |
| 1424 | TSEEEIREIKRQYIERFDKTGDARVFEDMFHPDAQYHNDSEKRTFDTMEEIKRWFNESWSNHDSQRHIHEVHFENGTATWHVTVHRTDKSTGQNYTIEFTYHDEYKDGKIVRTQEHSRQT |
| 1425 | MSEEEIRDLDRRRIEAFNKNDVDKVASHYHDDATVHYNEGITITNKEQLKEFVRKFIESAKRVKLDIDGMEIRGDTVTAHGTMHVTHGNKDTTIHFTYTITYRDNRIQEEHVHRNQQD |
| 1426 | MSEEQIKEFIKRLLEALDRHDVDKFVSMFHPDAEVHFSSGITFTNREEFEEWVRRWMSQFKDSQHDVHSIEVRGDTATVHWTQHANHGDKTTTFHGTTHFVFRGNKLVSMHVHIDQQD |
| 1427 | PDRERIADFVRRMLEEFFKKRDVDAAMSYYDDDATLHIYQGKTFTTKDEIKEWLERFLKTYKDAHVEIKSIHVSDGTVTVHIELHLNHKDQTRTYTITSTFRFRNDRIVEERVHEHQQ |
| 1428 | PVSEEEEKRIRDILRRLIEAFNKGDLDALASLYHDDWTFHLSEGYTAHSKDEFKKWVEEWLKKAQQIHLEIKSIEIRGDTVTMHVRITVTHNGKQVDMDVTEHHTFRNGRLTETRMHTDTKDK |
| 1429 | MDEEQIKEIIERFFKAMDTGDLDTIRELFHPDARVHFEAYQITLTTLDEFIDFIRRWLEQFPDVRHEIESIHIDGDEVTVHWTAHFNHNGETQTFRYTTHIRFKDGKIVEMQIHENDER |
| 1430 | TDESQIRELVQQLFEAMNNRDRDTFKSLYHPDATMHIEEEQITFTTREEIAEWFTRFLKRFPNARFEIESMEIRGDTVTVHVTVHFTHNGQQYTYRYTRHFRFKDGKLTRDQMHVDNQE |
| 1431 | TDESQIRELKKRFIEAFNNKDWDKLRKLVHPDATFHFEKEGVTLTTLDEFVEWFKRFLKRFPDVQIEIKSVHIDGDTVTVHMTMTFTHNGETRHVNVTVHDRYKDGKLVESRFHFDDTY |
| 1432 | TDQEQEEHIREVLRQFYEALDKGDADKVASLIHPDATIHIARDQITFTNKDELKEWAERWFSQFPDIQRHIESIEFRGDTVTVHFTVHVTHNGKTYTVRVTDHYHFRNGKLIRVESHVQPE |
| 1433 | ADKEQQEEIKDILRKLYEALDRGDMDKFKSFFHPDATYHNIETQIKFDDLDEMKEFLARWLSQFPDTAHEIKSIHISGDTVTVHVQTHLTHNGKTYTYDVTEHHRFKDGKIVETHTQFDEP |
| 1434 | DTDRQEHIKELKKRFLEAFDRGDAEALAQMFHDDATITFASVQITFQDKEEFKEFVKRFASTFKGAQREIKSIEIRGDTVTVHVTLHVTHDGKTVTIQQTTHDRYKDGKLTETHTTTDSKDT |
| 1435 | DTEIREQIKQFLRRLFEAFDKGDWEKLARLFHDDWQFTSAAEGKTAHTKEEFIRWFREWVSRVPGAQREIKEIRISGHTVTVHVTQHRHHPGSTVTTHVTEHHRFKDGKLTETRQHMSTEQQ |
| 1436 | DTELKEQIKEILQRLFEALDKGDLDAVASFYSDDSTVHVSYEQITFKNKDELKKWLEEFKKHFPGSQREMESIEINGDTVTVHVTVHHTHKDSTVTTHQTRHLRFKDGQLKEDHIQTHEHQQ |
| 1437 | PQEEQIRQWLRRFFEAMDKGDWQTLHDLFHPGATIHFYNGVTLTTREEIARFFKKMTESFSDVKRQIESIEIRGDEVTVHWTMHTTQGDETYTYHATTHFRFKDGKVVEVHVHINQQD |
| 1438 | MSREEIKELIERFYAAFNTNDPDAVREALHPGAEVHSSKGITFTDLEEIKEWVERWAKTFQNTRIQIDRIEFHGDTVTVHVTIHTNHKDHTVTTHATHHWVFRNGRITHLQEHTDDQQ |
| 1439 | PEKDERTIEELKRRFIEAVAKGDDPDKLKKLMHPDAQFHDSNGQTFNSLDEIAEWFAEVQSKFKDMQVEIKRIQFDGDTVTVHVTVHATHNGRTVTYTVTSHDTYKDNRIVETHVHIDSND |
| 1440 | QDEEEETIKELLERFYRAIANGQSWEWIEEFLHPDFTMHLSNGQTFNDREEVARWFQEVMKRTKDTRIEIKSIEFKGDTVTVHVTVHTTHNNQKRTITVTHHWTFKDGKIVRLEERRDSND |
| 1441 | SDEEEEKIKELIHRFVELYAKGDDPSAFKSLLSDDWTFHDSSGRTFHSKDEFVEWVERALSQFKDSKIDIDSIEFKGDTVTVHVTQHATTNNQTYTFTITEHHRFTKDQIVETRQHRDSND |
| 1442 | DREEELKEALRRYYEALDRGDMDAAASLFDKDWTMHQTHSDGSQQDFTTKDEFKEYFREQFEKSDIKRGEVRIHVNDDGTVTVQIEVHVTHDNSTRTRDTHDTHVVKDGKFKETHIHWDYG |
| 1443 | PDEEIIKELLKRFYEALDKGDWKALKDLLDKDWQYHQTHSDGSSRTFTTLDEFVEWYKEQVKNSEVHRGDIEIRINPDGTVTVESEVHVHHKDGTKTVNTHDTHVFKDGKIVETHVHWDDG |
| 1444 | PDESEIRETIKREAEAFNKGDVDAWASLFHPDATMHIYNGQTFTNLEEIKEWFERLIKRFKDAKVEVKSIRFEGDTVTVHVTFHFHHDNETKTFHVTQHITFKDGKITEKRQQMDEER |
| 1445 | TDEEEIRQWLRRFYEALNNKDWEKVKSLYHPHATMHIWNGRTFTDREEIAEWFRRILERFSRVRFEIKEIRIDGNTVTVHFRVTFHHDNQTRHATVTQHFHFKDGKLTEDRIHLNQED |
| 1446 | PSEEEIKEWLKQFYEAMDKGDWQKLSEMLHPDVTITYEAFQITFHTLEEFIRWYRRFMSTVEIHRQITKIDIDGDTVTVHFTTHATHGDETYTMNFTDHYHFKDGKVTEIRSHSDQS |
| 1447 | PSQEELREWVERWYEIVLKTRDYETAAQLFSDDWTYHVYNGTTFTTKEEFKEWFKRFMDRFKDVRIEIDSIHVEGDTVHVHLTMTTHHGDQQYHFRTTDTHRFENGRIKETRTREHDTR |
| 1448 | PSQEELEEWVRRFIEEMDKTKDVDTVASYYSDDAQYHAYQGITFNDREEFKKWVEEFLKKFKDVHIEIKEIRVEGDTVTVHVEVHTTHGDQTYTFDVTRHFEFRNGKLVRDEERMRDTS |
| 1449 | MDEEQIKEFIKRWVEAFDSGDADAVLSFYTPDSRVHFYNGETLTTLEEIKEWVERWQKSVKDAKREIKKIDVENGTATVHMTLHVTHDTHTITVDQTRHLKFKDGKLKEDHLHEDQKP |
| 1450 | MSEEELKEWKKRFFEAFNKGDLDKIAELFTDDSTVHFSEGITLNDREEIKEWFERFMKRFERFRIEIKSIHIDGDRVTVHVEVHFTQNGQDFTTEVTAHDQYSDGKIKESRFHFRTR |
| 1451 | MSEEEIKEFKKRLVEALNKGDLDKVAELLDDNSRFEDSEGTELRDREEIREWFKQMFENIQQTHIEIKEIRIDGDTATFHVEQHTTHNGKQVTVEVTSHDRYSDGKLTETQVHRRQR |
| 1452 | PRDPSQILEWLLKALYEIFQNNDADAFAEMFSDDWTLHWVEGITYTTKRRVKEFFERFVKRYPDTQFQVDRVEVDGNRITVHVTVHTRHGDQTYTIHQTEHHQFDHDGKIKETRIHSDEKPT |
| 1453 | PRDPEQIAQTVVRRFYEVFNKGDADAFLEMISDDWTFHDSNNRTYTTRDEVKTWFEEFLKRFPDSKFEFKRVEIDGDTVTFHVTVHVNHGDKTVTYHVTEHHHFDKDGKIKETRAHWETREV |
| 1454 | PRDPEQIKEWVVKAFAEAFNSNDWELFMSIITPDWTMHDSSGTTYTTMDEVREWYERFLKRYPDAKFQVDRVEAEGDTVTVHVTITVNHGDKTYTFHQTEHHKFDHDGKIRETRFHIEQRPT |
| 1455 | SRDPSQIAEWLAKRLLEALNRGDVDAVMSLYTPDATMHIYRGETFTTLDEIRKWFETFLRTFPDTHFQIDSVEVDGNTVTIHVTVHTHHGDKTVTFHITSHFTFDKDGRLKEEHIHTEQRDT |
| 1456 | PGEEAIKELKKRMLEALDKGDMDKFKSLFHPDARVTFSRHQRTYHNLEEVVKFFKEVTEKFKDMRHEVKEIRIDGNKVTVHVTVHVTHDSGQTVTIDVTEHDRYDHNGKLKETDSHFNQKN |
| 1457 | PGEETVKEVLRRFYEAFNHHDLDKLMSHYAPDATVTFSREQRTFKTKDEIRKWFEEVLKKFKDARREIKEIRIDGRQVTVHVTMHVTHDNGQTITIDVTQHFRFDDDGRIVRDDSHFNQRN |
| 1458 | MSQEEIKETLARYIQEAINKGDADLLRELYHDDATVTFNGRTFNSRDEFKEWFERWFKSVDDTKAEIKSIEVDGDTATVHVTIHVTHGDQPVTIHVTSHFVFDHDGKIVREEINAQST |
| 1459 | PSQEEIKEFVRRIIEEAFQQKRVDLAARFYTDDVRMTYNGQTFHSKDEIREFLERFLRSVDDTKVEVKSIEVDGDKVTVHVEVHQNHGDQTQTYHITRHITFDKDNRIKEDELNQQST |
| 1460 | PEDEEKLKRWKKRFVEEVFRTGDADKFLSYVHDDATVHFSSTQYTTKDQLRKWMEEWSKFEDVKVKIDEIRVDGNTVTVHVTVHATNSTTGKTVTFHMTSHDRYKDGKLVESRIRIDPQPQE |
| 1461 | PDQEEIKRLLREYYRYLDTGDAADELFDEDWEFHNNGRTFTTKEQIKDYLRELQSFKDMRREIKEIRVEGDHVTVHGEVTRNETDKTTTVHFTDTHEVHNGKFTRTQAHYDEKDT |
| 1462 | TDEEQIREILHRFYRAIDNGDWETVSRLVHDDATFHDSGSKRTFTTREEVAEWVKQVASFDTAHHLESIEIRGDTATVHVQTHETHNGRKVTVDATHHWRFKDGKVVEVQGHYDST |
| 1463 | MSEEQAREFVERVLRRMSTQLDDDWRAHVHTKDSTITFENPREFLEWWKKWARSRSRDIKFEIKRVEVDGDTVTVHVTVTMHHNGQRFTYHVTEHHHFRNGKLVETHFHIHQEDG |
| 1464 | PEEEIREWVKRFIEAFDKGDWEKLVKLLHPGVTIHFDGDNVTITSQEEFREFVERWLSRFDEMHRTPNEVHISNGTVTVHWELHVTQGDKTYTIRVTTTFHFKDHKLTEIRIHFDTQPQ |
| 1465 | ASEEEIKELDTQRLEAIDKGDMDRVREYFHPDAEIHISMHNKTFTSRDEFVEKFMREFLSQFEDVHRQIDQMHVDGHTVTAHVTVTFHHNGRQYHYRVTYTVTYSSKKLTRMEIHVDSGG |
| 1466 | PSEEEIKEFKERLVEALNNGDLDTFISLVTPDATFHYSEGITFTDLEELREWVERFLKTFKDLRIEIKDMHIDGDEVTVHIQFHVTQNGKQVTIDVTYHDRYDKNGRLVSSRAHFNQQ |
| 1467 | PSEEEIRDTLRRFYEAFDNGDIETLQRLLHPDVEVHFWEGITAHSLEEFTEFVRRFLSRFKDVRREIKEIRIHGDTVTVTYTMTVTRNGKDYTYTGTDHFHLDKDGKIKRVQSQVHQT |
| 1468 | PSEEEIRDWLRQFYEALDRGDADKAADLFHPDAELHFSEGITLTTKEEIKEFVERWLKRFPDTAHHLESIHIHGKTVTVHVTVHVNRNGQTFTFHVTDHYHFDDDGQVKRMESHINQS |
| 1469 | PSEEEIKELLRRFYEAFNNNDLDKLVSYFHPDAQVHIFQGITFNNLEEFKEWLERVLKTFKDVQIEIKRIEIDGKTVTVHVTVTFTRNGQTFHVDVTHHWHFDDDGQIVRVEEHSNER |
| 1470 | PSEEEIKQLLKRYYDAFDNNDLDTLLSLLHDDWTYHNNSGNTITDREEFKEWVKRWLEKFQDTAHHMESIHIHGDTVTVHVTLHVTHNGKDITFHTTDHHTFDHDGKIVRTEAHVNQS |
| 1471 | PEPDKEKIKQFVERFAEAFQKKDVDAIASLFHDDATMHVYNGQTFHSKDEIKEWFKRFVDNNLDTKVEIKEIRIDDSRGQVTVHWTATVHHNGKQVDIHATTHFVFKDDKIVRVHIHEDQHTD |
| 1472 | PSDEEIEEWVRRFYTAFNNNDWKKLADLISDDATFHDSRGEEITDREEFREWFERVIKTFKDIQLEIKSIEFDKKTPRVTVHVTMHVTHGDQDTTIDVTHHWHFNKDGQIVEVRAHFNPR |
| 1473 | PSEEEIRQWVRRWFEAFNNRDVDALASLYSEDATIHFSEGVTVTNREQFKEWLERFTKRFKDYRLEIKEIRVDKSDPTVTVHVTIHFTHGNEDRTIDVTQHFKFDKDGKLKEQRVQIDER |
| 1474 | TSEEQIKEWVRQFYEALNNNDWEKVLRLLDDDWQFHNANGETYTTKEQVREFIERFLKKFSDSRIEIDDMHIQDGTVQVHVTIHVTHPDGSTQTVHIQEHHRFKDGKITETHQHTDEST |
| 1475 | TSEEEIRDVIRRLIEAFNNNDWEAILRLLDEDWQMHISKGETYTTADEVREWVERFLKSFPDTRVEIDELRIENGTVEVHVTFHFTDHNGQDFTIRVTEHHHFKDGKLTETHFHFDESR |
| 1476 | MSEEELKEFVRRLVEAFNKGDLDALAELYHPDFTYHHDSGSTIRDKEEFRQWVREWVEKAKDYRIEIKSLEIRGDTVTVHVQVHVHDDSRTTTVDVTSHFRFQGKRITEEHAHSDQKD |
| 1477 | MSEEEIRDFVRRFIEAFNNGDLDTLAELVHDDATFHFPDGSDIKDREEFKKYLEELFRRYGDFRIEIHSIEVRGDTGTVHWTLHVTKPDKHHTFHATTTFHFRGKRIVEVHFHVDQHD |
| 1478 | DPREEIKEIKRRFVEAFDRGDIDALISLFHPGFTFHWNNRTFNNPEEVRKFLEELIKRYKDSRHEIKSLEIRGDTATVHVQAHFHHEDKTRTITVRVDDRYKDGKITESRFHEDQDG |
| 1479 | PDQEEIKEIDKQRFEAIDNGDLDAVMSFFHPGATMHWNNRTFTTPEEIRRFFEEWLKRVKRSRHEIKEMHIEGQTVTAHVDVELHHDNETKTVTVTYTITYKDGKIVEFRSQEDQKD |
| 1480 | ASEEEIRDWLRKFYEALNKRDADTVASLFHPDATYQDSSTGKEYSYEEFKRWVERWLKSARNFHIQIEEIRVDDNTVTVHYTVTFNHPGETQHYRFTDHFHFRNGKLTRMQSTTDNR |
| 1481 | PGEEEIREIVKQFFEALDTGDMDKLRELVHPDAQFHFTHDGKTITMHSQEEFLEYVKQLQRKFKDVKRQIDHIEFNKDTVHVHWTMHVTDEDGTTVTFRGTTTFHFRNGKIVEVRFHVDTEQ |
| 1482 | PGEEEIRRILKEFYEALDKGDLDRIAELVHPDAQFHYTQNGNTVTFDSKDEFKKWVEEWKSQHPDVKRQIHRIEVNGNTATVHYTVHVNHPNGRTFTFHATDHFHFRNGKIVEVRSHVEQRD |
| 1483 | PEFEERVKDWKKKFVEAYQNNDLDKLVSLLHDDATIHHSSGETITNKEEIREFLKKLLDTNKDARVEIKSIEIRGNTVTFHVEMHTTHNGQKVTFRVTVHDRYENGRLKESRFQFHQEE |
| 1484 | SLSEEEIRQWVTRFIEAMFNTGDWKQAADLLHPDAKITFNSHQRTFDMEEMIQWLREWKSRVSDFKIQIESIEVRGDEVTVHWTATVTHNGKTYTVHGTTTFRFRGNRVTEVRIQLHTSDT |
| 1485 | MSEEEIKEFYVRFFTDAFNRNDVDALLEIYHDDVTFHHADGSTITDKEEFKEWVERFIRRFKDIRIQWDRIEVDGDRVTFHITIHFRQGDQDYTVHVTVHVTFSDGRITEEHEQSDES |
| 1486 | PSEEEIREWLKRFYEALDKGDLEAVKRLLSDDATIEISATQKEYDVEEFIEWVERVQKRAKRIHREIKEIEIRGDTVTVHVDVTFHHKDKTVTVSFTETHHFRGKRLVSTHIHVDERE |
| 1487 | TSEEEIRQILRRLYEAFNNKDLDTLEELFHPDATMHVEAENRTFTNIEEIKEWLERFMKRFDVKLDITRIEVTEDKATVHVKVHMHTKDSTHTFDVTEHHHFKDGRLIETRIHIRQVD |
| 1488 | TSEEEVRRIKKRLVEAFNNHDWEALKRIFHPDATIHFYNSDGSTITFTNPEEFEKWFREWAKTFPDVKIQVDSLEVRGDTVTVHVTMHVTHNTQDYTFKVTTHDRYKNGKLTETRGHYNTT |
| 1489 | MSEEEIKQVLKRFYEAFNNKDLDALSELFHPDATIHFTNHDGSTTTFEDPSEFRRWVEQMLRTFEDMKIEIKEIRVDGDTVTSHVTVHVRHGDQPQTYTVTEHHRFKDGKITETRTTWHQQ |
| 1490 | ASEEELRQAMRRFYEAFNNKDIDKLSELFHPDATMHVENPDGSRITFHDPDEIRKWIKQTADTNPDVKIQIDEIRVDGDTVTVHVTVHVTHNTQPQTYTVTEHHHFKDGKITETRVTFNQQ |
| 1491 | DEDKEEIKDIIRRWVEAFNRRDVDALLSLYHPDAQVHFSNGETLHNLEDIKKFLARLFSNMQEFQVEVKSIHIEPNHVTVHMQLHTTHNGEKYTYDITVHFQIKDGKIVRQHVHTNEKK |
| 1492 | DEEQEEIKEILRQYYDSFNKNDLDKAASLMHPDATVHYANGETLHSKEEIREFLERLMKTWQEFHVTIEEIRVEPNHATVHYTVHVTHNGKKITYHGTDHYRFENGKIKEVHSHRNQRD |
| 1493 | PEQEKEIKEILERYYEALDRRDVDAVLSLLHPDVQVHHADGTTLNSLESVKEFIERLLKRYQEMQHTMEEIHFEPDHATVTYTMHTTHNGQKYTFHGTDHFRFENGKIKRIESHVNQRD |
| 1494 | PNPEQITELLRRFLEEAWERGDLDALEEFYAPGAQLHIWNGITFNDREEIKRWFKEMFEKFPDTHVEIKHVEVRGDTVTVHMTFHVRHGDQKYTYHITSHFHFDKDGKLRREQAHEQQQR |
| 1495 | PNQEQIVDTVIKWFEEAFNKGDADAFASFYSDGAQYHNWQGITAHSREEIKELFERFLKKFPDAQFEVKSVEVDGDTVTFHVQVHVRHGDQKVTYHVTSHMHFDKDGRLVEEHVHLQEQK |
| 1496 | MSEEEIKEILRQLYEAFDRGDWEKLARLLHDDARMHVSEEGRTFTNKEEIIRWYQQWWSRHETQRGEIDIHIHGDTATVHVTVHHHNGDQTHTVDYTHHWVFKDGKVVEVRIHTDSK |
| 1497 | TDESQIREWKKRYMEALDKKDLDAIEELIHPGATFHFADGRTFRDKDEYKEWVRQWLSKYDPKSREVHIHVDDSRTVTVHFTVTVNQNGKEVHIHGTVHDRYENGKLVESQYHHEQRD |
| 1498 | MSEEEIREFIRQLLEALDRGADEAASYYHPGSTMHVHHKDGTITWNSKDEIREWLKRFQSQFEFRHEVEDMHIDGNTVTVHVTVHVTHNGETRTYTVTRHFHFEGKRLTEDHNNWDQA |
| 1499 | ASEEQIRQIVRRLFEAMNNNDVEKLKELYHPDARIHFAGEGYTATTREEFAEWFKKFWSRNQFTIEIEDMHIDGDRVTVHFTVHFTHGDQPFTTRITSHFQFKDGKLVSEHIHMNTEQ |
| 1500 | MSEEEIKETLKRFFEAFDKGDADKLRELIHPDATFHFTFSNTTITTLEEFVEWLKEFLKTFQIHLRHIESIEIRKDEVTVHWTMTFTHNGETYDIRVTTTFRFKDGKIVEVRFHFNQT |
| 1501 | MSEEEIREWLKQFFEAFDKGDLDKLEELFHPHARIHDESSNTTFTSREEFKRWVKEFIEKFQIHLVTIHSIHIHKDTVTVHWTLQVHHNGQTYHVNATTTFHFRDGKLVEVRFSYNDT |
| 1502 | PSEEEIREILRQFYEAFDKRDWKKLAELWHPDGTMHVTATGTTATTLEEVIRMIKEFASKFDFQVIQIDSIEFNGDYVTVHVTITFTHNGQNYTVTVTETHHMKDGKIVETRMQFDQQ |
| 1503 | SDEEEIEEIVRRLFEAMSKTGDADAAAKLLHPDAQYTNSDEQRTYDREEYIEMIERRVKNDLKVHIQIESIEIRGDTVTVHWTATTTQGDEDQTYRYTTHIRFKDGKIVELRETTIT |
| 1504 | SDAEEIEEILRRMFQRLARQKDPEAFAQIVHPDAQFHDSSTNKQYDREEYKEWWERLIKNGIDTQIHIESIEIRGDTVHVHWTAHHQQGDTTHTVRGTTTFEFKDGKIVRIQFTHRT |
| 1505 | DSEQQQRIKEWLQRFFEAFNNNDLDTLKSLFDDDWQYHDQSGETLHSKEDFEEWVKKFLSTFPNVQIEIKSIHIDGDTVTVHVQMHVTHDGKTYTFHVTEHHRFENGKLKETRITFDPHP |
| 1506 | PSQEEQIREALRRLYEALNRGDIDTLVSLFHPDWQFHHSSGQTFHDLEEFREWAERWARSNKEYRVQIDEIEFRGDTVTVHVTIHVTHDTGTRTIHVTDTHHFRNGKLTETRARYDEKQT |
| 1507 | PGEDTEKIKEFIQRFIEAVNHNDADALAELFHPGATVHFSDGVTITSKEEFKEWLEEWIKTFKDVRIEIKSIHIDGKTVTVHIQVHVTDKSTGQTFTFRVTVHDRYENGKLKERRIHIDKSG |
| 1508 | PDFQEEIKEIDTRRVEYVWRTNDADALFEIFHPGAEIHYYSEQVTLTDLEELKEWFKQLVERFPDVKVEIKSIEVRGDRVTVHVTFHFNQSEGTTTYQVTYTVEYKNGKITRYEVHIHQT |
| 1509 | PSSEEIKEFIKRLLEAWNKDADEFYEIVTEDWQYQDARTGQTYDAEEFREMVKQWQETFGDVKVEVHIDARLENDTVTVHYTVHVNTTTKTTTTDFTEHHTFKNGRLVRTRQHADTKG |
| 1510 | ASEEEVEDFKRKFVEAFAKDWREVRKIMTPDSTFIDARTGTEYSLDEFADWVRRFQEKFSDIKFEIDFNLEFHGNRVTVHVTFHANTTNRTYTFHYTFHDEYRNGKLTRSQIHTRQEG |
| 1511 | PEDEEKIRELVKRFYEAFNRRDLDALEELFHDDGRYHNSSDNNSYDKEEFKEWVETFLRQFPRARMEIKSIEVRGKTVEVTVQVHLYHPNRTQTFTVHDTYHVRGDKIVEIRSHVDDG |
| 1512 | DESTEKIRQWLKRYIEALNNKDLDALESLFDKDWRYHDARENNSYDRDEFKKRVETFLRQFPNVRFEIKEIHFDGNTVQVHVQVHVHHDDQTRTYDVTEHHRFEGDKITETRVHHDST |
| 1513 | PREDEMKEKIKELKRRIVEAFNKGDLDALASLFDPGATFHLSNGQTFTTKEEFREWVKQFIDANIKIQVTSMEIQVTDDTHVTVTVHVTIHQTGTGKTVNITQHDHYRFENGQLKIVEVRTQVDEG |
| 1514 | PKDEKAKEDIKEWFKREAELFNNGDMDAWASLFHPGSTFTDASTNQTYNRDQLKEWFTEMFKNDVKIEIKELRIEKKSDKTFTVTVHVTFHMNHNGETRTVHITFHDHFELNGSEWRLVHRRIQTDGS |
| 1515 | PDQEKAKEDIKELVERFYRAFNNNDLDALKSFLAPDWRYHDSRTGQTYNAEQFLEMVEKMLRQDTHLQIDSIRIEQKDENEFTVTIHVTMTRTHNGQKQDIHVTDTHRVRKHGDGFKFVETRTRFDNG |
| 1516 | PREDEIKEAIKETLKRLYEAINRGDADAVAELFAPDWRYHNKSENQTYNKEQFREMIKKMFSNDTRLQIDQIDIEIKSKDTATVTVHVTFHTNHNGQTYTVHVTDTHHFEYQDSRLLLRRTESQFDGG |
| 1517 | PSEEDQEALRQTKRRYVEALNTGDLDTLSELLTDDSTFHHDDQTFQISKEEFKEWVKKMNSNDTKIQIHSIEVHLDSDGTTFTVTVHVTVHHNHGDKTKTVHVTTHDHYKKTDNDFKLKETRTHTDERS |
| 1518 | ADPSDQEAIRQVVERYYEALNKGDLDTLEKLLTDDWTLTTDNSTQPVSRDEFKERVKELLKNNTQIQIHSIEVRQHDNGTEFTVTVHVTVHHNHGDRTKTVHVEDHHTLRKDDSDFKIVHTQSHRDERS |
| 1519 | PDPNDEEAIREIVRQMFEAFNKGDLDAIASYYDDDVTFHHDNQTFQISKEEWKKWVEEVLRRDVKLEIKSIEVRQHPDGTHFTVTVHVTVHQNRGDKTHTVHVTRHFFFRKDDSDFKLKEDREHTDNRP |
| 1520 | PGEKTLQEAIEETDRRRVEAINKGDWKKIKELFTDDATFHHQSGQTYDHEDFLRWVKTMHSQQWQFEIKSIEIHIHPNGRTVTVHVTVTATNQRTKQDVQFHYTIVYVFENGDVKVKEMHLSTDH |
| 1521 | PGEETAEEQIREWKKRFIEAVNNNDRDKVKELLTDDATFHDANGQTYDADEFADMVEEFARQDWKIQLDSLEIRFQPDNEHVTVHVHITVHNDSTGTQIHFDATDFYRFENGSLKLVSTQYHTNN |
| 1522 | PGEEEAREKIRQVKRRLIEALDKGDWETVKRLFDDDFTFHDASGQTYDADEFRRMVEKMASHDVRREIKSLEIRRDSDNHNFTAHVHLTVQDSRTGQEVKFTATDFYRFENGSVKIVETHLHTDS |
| 1523 | DVDPSQIEQLEELKRRFVEALNKQDLDKMKSLMDDDSTIHSNPMNRDQFKEWVERLAKATKDARIEIKEIHFQLRSKDTVTVTVHITFHATHNGKTKTVHITYHDHYVQTKDGWKLKSTEERSDEP |
| 1524 | DMSKEDQEQIEEWVRRLIEAINKQDRDKVLSLYHDDSTNDSNPMDAEELKEWIEKMLRDLKDSRIQIEKIDFEQLDKDHVRVTVHVTIHRTHNGRTQTVTVTSHFIFEKDKDGWKLKSEEERRTNQ |
| 1525 | SQNEEIKKAVRELLKRLFEAFDKGDADAMKSLMHPDWRYTDASTQTTYDLDEFREWVERWQRNFSTRHEIKSIEIEIKPDGTVTAHVHVTTHTTHRNGEKRTFDVTETHHFDIGPWKVKETRVQYDNKG |
| 1526 | PDDEEAKEAVKQFLERYFEAINKKDVDALRSLFDDDWRYYDARTNQTYDADEFAEWVERFQSNFDSQIHIHSIEIRIHSDGTVTVTVHVTVHMTHPDGQTQTVKVTEHHRLDRREWKILETRAHWDNGG |
| 1527 | SDEEEIKEAVKEVIRRYMELMDNKDADAVASLYAPDARLHNADRNETYNFEELKEWYRRFLSNFDSKHDIKSIEIRIHPDGTITVHVHVEVHVTHKNGQNHTVRYTYTFVLDQSEWRIKEVHVHTDNGG |
| 1528 | MSDDEMREAAKDWLRRYFEAWNKGDLDKLRKLYHPDATFHDSSGQTYDKEEWVKRAEELLKTFDFTLQVDEVRAQVHPNKTHITVEVHVTAHVHHQSGETRTQTVTSEFHFQFENGQIYLLEEHVTTEQK |
| 1529 | SVGEETIERLIRRFYDAMNRGDLDEFISLLHDDWRWHDTDRGETYDKEEWREMWERRFRNSDFRVQIDSMEIRQVDENEYRVTVHVTVTHHDGNRTRHIHIEDHHRFRQTDGELKLVETHTHTDPG |
| 1530 | PMSEEAVREVIRRWFEAWNNKDLDKLASLYHDDATFHFKSHNQTYDKEEWLEWVKQLLRHSDIKVQVDSLEVRQVSKDEYTVTVHFTVTHHDGNETRHIHITAHFHLRYSKDSVKIVEQRDDYNSG |
| 1531 | PMGEEELKKFLKRLYEIMDSGDADKFASMFHDDVTFHNADTNQTYDKEEMLELLRRFASNAETHRQIDSIEIRYVDKDEIRVTVHVTVQVHQGNKTEHYHITHHWVFRYTDNRVQIVEVHESRDPG |
| 1532 | SSDREAVERMVRRYFEAWDKKDWEKLASLFDEDWRYHDAETNQTYDREEFIEMFRRFASNAQVHHEIHSLEVRQVTPDTFTVTVHFTVHEHHGNETHTFRVTEHHHFKDTKDGVKVQETHVHFDSE |
| 1533 | PASQEQVERLIRREAEALNKNDLDAWASLFHDDATFHDPDRNQTYDKEQMRKMIEEFIRNTDFRVHIDSIRIEQTDKDEYTATVHWTIHEHRGNETHTYHATTHDRFRYTDGDLKIIERHTTTDPG |
| 1534 | DTEELEEAARQIVRRLIEAFNRGDMDELSELYAKDEFTFTQYQGQTFSYEEFITMLERRFSNDTKVQLDSIRIEIKSKNEVTVEVHVTFHTHHNDETQTYHVTSEMHIRKEGDSWKILEEHERTNST |
| 1535 | SDEEAEEAARELVRRYYEAINKGDLDALQSLIDKDTWRYHTSSGTTYDYEEFVKMIEELFKAGVHVEIKGIEVRIVDKDEATVTVNVQFHQNHGDRTKTVDVEDHHHFRKKGDSWKLTRTETHHRST |
| 1536 | DQPEDDEEIKELIERMYRSLNENDIDKAASLLDPENFRYHTDSNTEYDYEEFLEMIERMASQGFRIQIDSLEIRWVDKNEVRVTVHVTIHVRHGDKTTTFHATHHWEFVKEGDSWKIKRLETHRNST |
| 1537 | DEEEIKSAIEELKRRLIEALNRNDMDTIRSIFDPTNFRFHQWQGQTFDFEEFITMIERRASAGFEIQLDSLEIRVQSSNSATATVHITVHFHHGDKTQTYHYTFHDHYRKEGDSWKITHTQEHRHST |
| 1538 | PDPSERQEQIKRIKERYIEAVNKGDLDEIRELIHDDARVQAEPLDKDQIIKMVEEITRNDLKLQLDSVEIHVDENDQVHATFHVTVTDGRTGQTTHVTYHDVYEASTELKIKSTTSRNDS |
| 1539 | ADPKEIIEQAEEVLRRIYQAFNEGDVDAVADLFHPDARIQSEPLNRDQFRDWVEKFFKAGFEMHVESIEFRVDHNDEATVHVHVTVTDRRTGSSIRVQETHRVRYSNGLRIVSTRTHNDS |
| 1540 | PDPSEIISQAREILTQFYEAINKGDLDRIEELLDDDVRIHSSPQDKEQFKEWVEKLTRNNFHLEIKSMEFRVDHSDEITVTVHVDITDQRTGRTITVTNHDFLRYKTELRIVSHTWQNNS |
| 1541 | IDPKEAEEQIRDLVRRFYEALNKGDAEAVARLLHPDVRVHTNPLDREQIKEWVEKFFRNNFEVKIDDLEIRFDSSERVTVTVHVTITDRRTGTTFHVTHHWFIDQSTELKIKHVREHNTS |
| 1542 | PSEEEQREEIKQLKERFAEALNKGDVDAVMRMYHDDARVTANPINKEQIKKWVKEWHDQGWEVEVKSLEIHVDENEEVHATAHVTVTDRRTGQTFHVTYHDVYVLSNGLKIKSTQSHNDS |
| 1543 | PGEESAREIIKEIKRRYVEAMNNGDADAAAAFFTDDATFWHNGQQQPLSREEFKKMIEEFFSKIDVKVEIKSIEIRIYDDGRIEVTVHVTFTYSETGTTADVDQHDVYREKDGTMKIIESRTHTRRKQS |
| 1544 | PGEKTMEEQVREVIQRFYEAMNNNDLDTLAELFTDDATFYHNGQQYDLSKEEFKKWMEEFLRHMDVKFEVDSIEIHIHDDGTVTAHVHVTLKHDKTGRTFEVTETHFFVVRNGSVKIKETREHTDSTKD |
| 1545 | PGEKTQQEQVREFVRRLITAFNTGDADAIKSLYTPDATFTHNGETYQLDQDEFKEWVEKFIKNLDFRLEIKSIEIRVDHDGTVTVTVHVQQTEDKTGRHFHFTRHFFFRFKDGEIRLKRDEEHTEERKD |
| 1546 | PGKKTIQEQVEEIVRRYYEALQNRDADKIASLFDKDATFTENGETHPLDKEEFKKRVEETLRKFDFRVHITGIEVEVKDDGTVTVTVHVEFHFKETGRTFKVTEHHQLRVENGSVKIVRTETHRDSTKD |
| 1547 | PGKETIEEQIRQWVHRYYDAFDKGDADTLASLIDDDWRYTTDGQTFQVSREEFKEAMEKIAKSVQTAHQIESIEIRVDDSGTATVHVHVTVHDSKTGRTFRVTDTHFFQLKDGELRLVETRTTTRSTSD |
| 1548 | SSEKEIREAVKEMIKRYIEAFNKGDLDALKDLYDKDARFHMGGYNLEQYTEWVRQLLESGTKVSLDSVEIHVNDDGTATATIHVTFHTHTPTSTHTVHVTRHLHFRVQDGRYKIVRDEIRENH |
| 1549 | MSEEERQSAVKEVLRQLYEAINKGDMDKVRSLVHPHATFHDSSRNQDYNREEFIEMAEKLTKNGVHFEIKEIRVQFTDKDEATVTVHVTVHHHHGDKTKTVQVEEHHRFRFKDGDVKLVETRAHFDDT |
| 1550 | MSEEELKKAIKEFDEERAKAFNTGDWEKLRSLMHDDATVHNYAEGQTYNRDQFLEWVKKMHSQGTRIQITEIRVQVTDENTVTVEVHGTVHTQRGDQTYTVHATYTMFYRFNNGDIKVIRMEIRLDNS |
| 1551 | PSEEELKKQIEETLRRLFEALNKGDLDAFLSFVDDDWRFHNTATNRTFDREEFRKWLKEFKENGAQIDIHEIRVQVTDQTNVTVTVHVTVHHNRGDRTTTIRVTEHHHFRFENGSVKLVRTQVHVDNT |
| 1552 | ASEEELRTQIKEYKRRLVEAFNNGNWEEFKRLVHPDATFHISATQRTYNADEFVEMLKELWKNGTRIEIKQIDIQFGERTHVTVTVHFTVHTNHGDKTRTIHATAHDRYRFKDGQIYLIESQFHFDNS |
| 1553 | MSEEEQKKAVEELVRRLVEAFNKGDLDELKEIYAPDATFHYNSTQRTYSKEEFIKMVEELTKAGTQIEIKEIRVEIKDDTTITVHVHVQVHTRRGDRTTTFDATRTFHFKLENGSFKLKHDQVTIDNT |
| 1554 | MSEEEMERQIREFKRRFIEAFNKGDMEKLKSMFHPDAQFHFANTQRTYNAEQFIEWLKRVLDNDTQIQIDSMEFRFGDSTHVTVHVHVTVHTNHGDRTYTVRVTATDHYRFENGSLKLVRSQFHHDNT |
| 1555 | PSKKDEEDIREFKRRYIEAFNKGDWEKLKRLIHPDATFHQNNTGRTFDVDEWVEMLKQLADQGVKIQLDSLEVQQRSSETVTVTAHVTVHDSQTGRTRHAQQHDRYRKIGDTWYLIETRVTRHGH |
| 1556 | PSKEQEEAVREILRRYVEAVNSGDADQLKELYHPDATFHQDDTGRTYDLEELREWYERMFRNNVRMQVDQIDIQVDDKDQVTVTVHITFHNASTGTTTHAQYHFTIRKEGDSWKIVEVHVRTHGE |
| 1557 | PSKKQEEDIKEILKHYIRAINEGDVDAVASLYHPDARLHQDGTGRTFDYEEIREWYERMVRNDVKVQLDSVEIRVDDKDQVTVHVHVTYHNGKTGSTRHATQTFTVRLEGDTWKIVEVHVTTHGE |
| 1558 | DEEEAQEQIKEMVEREVELLNKGDMDTWKSLVHPDATIHFSNGQTLTDRDEMKEWYKRFFETTNIQITIKSIEIQYGDKGEATVTVHFEMHRHTKDGTITAHFTAHIRVRLDNGGLKILSKEVHLDNRGG |
| 1559 | DESEAEEQIREFIRRFIEALNKNDADTLASLFDDDWRLHVADGETITTREEFREWVRRFYSEFDFQIQVDSLEVQKSHEGHYTVTVHVTVHFHHKDGTVTAHVTEHHHFRRDDGGMKVVETRVTIDRRGG |
| 1560 | DESESEEQIREFIKRYYTAFNNNDLDALAELLAPDWTFHHSNGSTITNLEEFKEWVRRLIERFNVQMEIKSLEIRKGDEGTATVHVTVQVTFHTKDGTYHATVHDTHHFQLDDGGLKLKETHSRWDHSGS |
| 1561 | SESEAEEQIKEWLKRFYEAINKGDLDAAASLLTDDWRYEDSSGEEITSREEFKDWLRRVMERFNFQIEIKSIEVRYGSPDFYTVTVHLEVHFTHKDGQYTRDTTDHHVFRRGNGGMKIVETRVHWDDKGG |
| 1562 | DQSETEEQVRETLRRFYEAVDKGDAETAARLLHDDWQFHNSKGETIHTLEEFKEWVERFFKNTDFQRQIDKQDFQPGPEGTMTVTVHVTIHFHHKDGTVTVHVTEHHHVRRDEGRLRIVRTQVHIDERGG |
| 1563 | PSEEDEQAIREIVERFYEAINQGDLETIDRLVHDDATIHDSSTNTDYDKEQFIRMIEKLFKNDFKLEIKSIEIHQDGNNDFTVTVHVQIHVTHNGENQTYHVTHHWFIRKKDGRYKIVEVRIHWKGNPS |
| 1564 | PSEEDQRAIEEMLRQFYRAFNTGDFEQIDSLVHDDATFEDKSTGQQYDKEQFREMFERLVKNNTKIQIHGIEFRSNGNNTYTVHVHVTFHTTHNGENHTQRVTETHVFEKRNGEWYIVETKFQYDGAPS |
| 1565 | PSEEQERKLREWKQRYVEAFNKGDLETIKSLFHDDATFTDSSNNQSYDKEQFIERIRRLQSNDTKMQLDSMEIRLNGNNTATVRVEFTFTTNHNGKTQDQRFTYTDFYRFQDGSLKLVRTEIHRDGAPK |
| 1566 | PSEEEEKEIRRLVKEFYDAFNNKDLEALASFYAEDAKFHDARTNQTYDREEIKRMIEQMLRNDVKMQVHSIHVQSNGNNTITVTVHVQVHETHNGKNQSFTFTQHYFFVKQNGSWKLVEDRLHLDGAPQ |
| 1567 | PDPSQEEEIKRLLKEYYEALDNGDLDTAASLMTDDWRYHDARTGQTYDKEEFKKMVGERFKRSDFQRHIHGIQIDDAKGNTVTVTVHVTVTHHHNGKQFHTHYTDTHHLTFFNGELKIVETRSQWDDKPD |
| 1568 | VDPSQEEKVRQFIRRYVEAWNNKDVDALASLYADDARYQDSRTGQEFDKEEMRERYEKFAKNSDATMHIDSIEIKDAKGNHVTVTVNMTVHVTHNGKTITIKVQYHFFFKFENGELKLKRLTSTHDEKPD |
| 1569 | ADPSQQEAVRQVDKERVEAFNRNDVDRMASLFHPDARIHFAPTGQTYDRDEFREWVERFLKNFDVKVQIDSIEIKDAKGNEVTVTATFTMHVTHNGKTITVHATYTIRYRLKDGQWKIIEVRIHRDEQKD |
| 1570 | MSEKELQEALKEWVEREIEAFNKGDMEKWKELFHPGSTFQNESTQQTYDREEVIKMIEELLSNGVKIQLDRLEVQFDHSNHITVRVEVQVHQHHGDQTHTMNVERHDHFRLKDGQFRLVRRQVRIDNT |
| 1571 | MSEEEMKEAVKDWVRRYFEAINNNDLDALRRLYTPGATMHIARESQTYDYEQIVKWYEEMLRSDLKMEVKSLEIQIDHTNEATVTVHFTVHENHGDQTHTFRAEAHFRFRFENGQLKLLEVHFHFDQT |
| 1572 | MSEEELREAIKDWFRRYVEAFNKNDLDALDSLYHPGVTMHIKENNKDYNKDQIREWYERLLSQDTKMQLDRLDIQIDHTNEVHVRVEMTFHTNRGDQTHTVHVQAHFRFRFENGSLKLVEVHFQFDHS |
| 1573 | PGEEEAEKQIRELVRRFFEAIDKGDLDQLLEMLDDDFRFHDASKGETYDKEEFAEWAERLASQDSKHDIHELHIEFNGDTITVRVHWTLHLTHGDQQYTFHGTTELHFERNNGTLYLKEMRVEIHGE |
| 1574 | PGEEEAERAIREWVRRFVEAINKGDMDTVDELFTPDWRFHHRSTQTTYDKEEFREWVEKLFRNDTKIEIKSLEIEIRGHTITVHVTITVHTNRGDQTYTFEVHETHHFERREGEFKLVRTEAETHGE |
| 1575 | PGEEENTEVIKELLKRFYEAIDKGDWQAIHDLYHPDARLHNRSHNQTYNREQIVRMAEKQASQDTRRQIDEMHIEVRGNTITVHVHVTVHVNRGDRTETYTFTQTFHFEYSNGEFKLIEDHVQTHTN |
| 1576 | PGEETQKEQVKEWLTQYFDLINKGDADAVASLYHPDARVHNSSHNQTYTYEELKEWYERLASADFQIQVDSIEIEINGDTVTVHVHYTMHVNRGDKTYTFHGTTTFHFENQDGSMYLVEVHTTTHSS |
| 1577 | PEDEEAIKEIKRQLIEALDKGDMETLRQLFHPDVTFHHKDQTWNLNIEEWLERVARTLSNVEVHRHMKSIHIQPTTETTWTAEVHLEVHETHNGQKHTFRVTQHDRYVKLGDEWKILESESHRDST |
| 1578 | VDESEQREAIKEWLQRYYEALNNKDWEAVASLYTPDSQYYQPNGQQYDREQFIDMIRKMLSRNDVQFHVKQIDIEVKPDGTVTVTVHVEVHETHNGQQYTFRITQEFRFRYEDSEFKLKEDHVRRDDG |
| 1579 | PKEEEAKEAIKEWLKQFYEALQRHDVDAVASLYDKDSRFHDSRDPRTYDRDEFREWVERMLSSIDDFKVEIKEIRIQFNGEDRVTVEVHGHVTFNHGDSQRHATVTQTFVFNLKDWKLVEDHATFHDHT |
| 1580 | PEKEIREQIKEIKERLVEALNKGDMDTFASLFHPDAQMHISRGRTFNSRDEIKKWFKDYKETFDVRIQITSIEIRISDSNQATVTVHITFHYNEDNKTVDYTFHDRYVIKDGDMRIVRSQIHSHER |
| 1581 | PEEDEMREQIKEFVKREFEAINKGDLKTWEELVHPDATFHNSSEGRTYDVEEMKERIKKFVEVPTQIEVKSIEIQINKNGEATVTVHVQVHEHHGDQTHTFNITQHDHLRRINGQWYFIERHVTTDST |
| 1582 | PSEEDEKEIRETKRQYVEAWNNNDLDKLADIVHPDAKYASRNLDYEEYIEWVKRWMERFKNVQIQIHSIHIQQDGSDNITVTVHFTVTEHHNGQQQHHRYTAHDHYRKSNGKWFIVRMETRRHGS |
| 1583 | PSEEDERAVRDVVRRFYEAINHNDLDKLLELMHPDATFRARNLNYEQIKEWFREWMERFKNARLEIKSIEVRQHGSDTFTVTVHVTMHVTHNGQDQTYHITHHWVLVKFNGEWKIVSVEERTNGG |
| 1584 | ADKEQQEDIRRIIQRLVEAWNNNDLDTWLSLFDKDWRYSSRNIDKEEFREWMERVIRTFQDLKVQLDSIRIELDGSDTITVHVHITFHHYHNGQQHTHHVTETHHFVRKEGRWYIVRTTTRRTDG |
| 1585 | PDEEEQEKVKKFIQRYVEAFNNNDLEELESLYHPGAQLDINGVDLKQFKEIVERLIRNGFEFRLEIKSIEIRKDGDEITAHVHVQVHTTHNGKTDTVDVTQTFHFDTRHDQLKNHQVHHQGS |
| 1586 | SNKETEELVRELIKQWFEAVDTDPDKAASYYDEDAQVHSSTGETLHDLQSIKDYIRNHSKDYQHELKSIEIRIHPDGTVTVHVTFQVHDRTTGQTYTVHTTFFIVQKGDTVYIKEQRTTIHTG |
| 1587 | LSEEEIKEWLKRFYEAVDRGDRDKIRKLLHPDVQMHSASGRTFNNIDEIIKWLSEFTSRGFKRHIREIHIEITKDEVHVTVHAEIHFEKTKQTIKFTHHWTFDLRHKKIVSVQFHETG |
| 1588 | PSDEELKEWKERFIEAINKGDLDKLRELLHPDVTFHIWNGRTFNNLDEVLKWFEEFTSQNWHMEIKDMRIEHKDNEIRVTVHITVHNDSTGQTFHFTFHDRYDKRHKKLTESRIQETQ |
| 1589 | LSKEEARELVERFFEAFNRGDMDAIREIVHPDAQFHDSNGEQLTNIEEIVEWAKKLFDQGVEIQITEIHVEVTETHVHVTVHWNGTDRRTGRTFRGTTHFVFDKRTKKIVRLEFRHTG |
| 1590 | DTPEDEEAIKELVKREVEAFNKGDMDALASFYDDDAQMHLSNGQTFDTKEEIKKWLEELSKNSQIHVESLHIQKDDDNTFHVEVHAQMRNKTTGQDVTVTRHVTVKREDTGLKIKHDQVRIDSN |
| 1591 | KDEELEKAAREVVRRLIEAINTGDLDTLKELYAPDAQFHVWEGRTFDTLEEIAKWFKEFAEKFDLEIKSIEIRIDDDDRVTVHVHVKVTNRETKQDFTFRSTMHLKFDHGGVKIKREQVDVDPN |
| 1592 | DKEEDETDIKEILKRLFRAMDEGDMDTMKSLFDEDWQYHNTSGRTFTTLEEFAEWISQFSSDTAHHIKSIEIRKDDNNQLEVHVHVEVHRSSTGQTFRYTETHRFEKKDGSWKIVETRQHVDPS |
| 1593 | DDEEMEEEVRQLVRRLAEALNKGDRDAIRELYHPDARMELWNGRQFDTLDEIVEWFMKWASHFDIEIKSIEVRVDDNQTVTVHVHFEATDRRTGKTVTFTSTIHFVKNDTGMKIKEEQIHADSN |
| 1594 | PETEEQVKDWKKKFVEAVNNGDMDKLRELFHPDARMHLSNGRTFTTLDEILEWFKKWASTYTIHIHSLEIRENDDGSVTVHVHGTVHNRRTGKQVQVTATDHYDRSRNKLIRSQFNFDPQ |
| 1595 | PDLQEEIRELVKRFYAAMNTGDADTLRDLFHPDATMHLSNGQTFTTLDEILEWLIKFASHFDFQITSIHIQVNHDGTITVTVHVTVRDRRTGQEYRVTDHYHVDSRHGKIIEVRSHVDST |
| 1596 | PDFQEEAKEIVRRLAEAFNKNDRDKLKDLFHPDAKMHVYNGQTFETRDEIVEWFSRLASHAQIHIHSIETHLHDDGSVTTHVHWTMTDKRTGQNFTGTTTFHVDRRTGKITEVRIHIDSN |
| 1597 | SDESEIEEAIRQIVRRLVEAFNKNDMDKLAEIYDKDATFHINGQTFSDLEEFLEWVKQVVSRGVQVTFTVEIHINGDTVTVHVRATFHFESHNQTFTGHSTIHIRLEGDQWKIVEEHLQIDQN |
| 1598 | SDRKEFEEEIREIIRRMFEAFNKGDRDTLRELYDKDATIHINGQTFTSWEEFLKWVTDVNSRGVRVEFRVHVEVHGDTVTVRVEAHLHQESTGETYTVRSTIHFRLENNRLKIVEEHVQVDKQ |
| 1599 | ADESEWQEQVKQWVERFVEAFNKNDRDALRELYDDDSTVHINGQTFTDWQEILEYISQLASTNAQVTFTIEIHVSGNTVTVHVTLTVTQENTGRTFTVHSTFHFELQDSQLRLVEEHVQTDQN |
| 1600 | NDESEFRQVIKEWVERFFEAFNKNDRDELRKLLDDDATFHINGQTYSTIEEFLEWIERVWSRGVQVTFTIEVHVDGDEATVRVEWTAHFKSTGETYHGTTTFHFRVEGRQFKIVEVRIQMDKS |
| 1601 | TSEDEFKEQVKEVLNQFYEAINRGDRDTLRELFSKGGTVHFQNGRTFTDQEEVVDWFSKFASSGFRIEWHIEIKEITEEHVTVTVHIRITDQNNNTQNVTDHYFMRLENGTWKITEVRSQYDN |
| 1602 | MSEKEIREAIKEFLERFYELLDRGDLDAIASMYADGATMHLENGQTFNSKEEIKQWFEKQISSDMRREVEVHIREISETTATVTAHVTLHGKDGTTIHITQEMHIEFQNGSIKIKEDRITTDS |
| 1603 | PSPEDQEKIRQIIRRYYEAFNKGDADKMAELFHDDWTFHHANGQTFTTKDEFREWATRLLSQNLTIEVEVHIHSGSKDEVTVTVHFHVRQKDTTFTEHHRFRKDKDGRLFIVETRVRQDGS |
| 1604 | MSKEQEDQIREWFERYYEAINKKDLETIVRLVHDDVTFHHDNGRTFTTKEEFKEWVKQILDQDWTLRFSIRIDSGSEKEVTVTVHVTYEQEPRTVREEHHFRFNDDGSLRVVETRFDSHGG |
| 1605 | PDPHVLEAIKDFVRRYAEAFNKKDLDTLVSLFHEDWTYHHSNGQTFTTRDEYREWVKRLLEQDWTIDVEVHFTSGSEKEYTVEVHFTFRQQPMTVTEHHRFRRHDNGQVRIVETRARWHGG |
| 1606 | PSKEQEEKVREWLERFYEAFNKKDLDTMASLVHDDVTLHLSNGQTFTTKDEIIKFLKELLSQDLTLEFEIHIDSGTEEEITVTVHVTIKQIDQTVTHHWFFRFDKDGNIYLVEVRENLTGK |
| 1607 | PSEEQEKAAREVIRRFYDAFNKGDIDKIAELIHDDATLHIWNGQTFTTKEEVIEFIQRLLSQNIQIDFEIHVKGGSKDEVTVEVEVHYRQSDMTVTHHWFLRRLPDGSWKVVELRARSDGK |
| 1608 | MSEEEIRQLKRRLAEAFNKKDADAIAELFHPDSRVTFASDNRTFTDKDEIKEWFTQYASRDIQVEIKSIEIRGKTVTVHMTFHNKRTGTTTHATFHDHYDDNGRLASSEIHFNTQN |
| 1609 | PSEEEIREWARRYYEALNNNDADTAVSLMDDDWTVHFSEGRTFHSKEEFKKWVEEMLSTDVKIEIKDLHIEGDTVTVHGTVTRTHNGQTRDLRTTDHHTFDKNGRITETHFHHDQQ |
| 1610 | PISEEQIKEFIKRFFEALNKGDVDLLAELVHDDATFTHNNQTFRMSKEEFREWVKKWLSSDTQIEIKSIEIRGDTVTVHWTAHTNKGDRTQTVHGTTHFEFDHDGKLVRVQTHNNPTS |
| 1611 | PVSEEQIKEFKKREVDAFNTGDMDKLADLYHDDATLTHGDQTFPMSKEEIKKWFEELFRNDTKFEIKSIEIRGDTVTVHVTLHTNHGDQTTTIHYTYHDRYQPDGKLTESRESEHPTS |
| 1612 | PMSEEQIEELVRRFYEAFNNGDLDKLREIMHDDATWTNGDQTFPMSKDELIEMFQKMLSTDTKLEIKSIEVRGDTVTVHVTVHTNHGDRTHTFHVTHHWTFNKDGKIVEVRQHMQPTR |
| 1613 | STSQEQNKEIDTRRVEAFNKGDWEKLSDLFHDDATFTHNNQTQPRSKEEFIRWVKKVHSNDTKFEIERMEAHGDTVHVEVTVHHTHGDKTTTVKVRYTVRYHSNGKILEYHEHRHPTS |
| 1614 | PISQEQIKEFLRQFYEALDKGDLDKLRELVHDDWTYVNNDQRYHMSKEEFKEWVKKFASSDTKREIKSMEIRGDTVTVHVTLHTNHGSETKTIQYTEHHRFDHDGKLVETQQHEQPTS |
| 1615 | PASEEEIREWLKQFYEAFNNKDWKKLADLMAPDARMEVTQSNGQNYEFTTKEEIIRWFQQLMSQFDSIEIKEIRIDQDRQTVTSHVTVHFTHNGQRFTVRVTEHHHFDHDGKARETKTTFDHGG |

### REFERENCES

[0053] 1. Jiang, L. et al. De novo computational design of retro-aldol enzymes. Science 319, 1387-1391 (2008).

[0054] 2. Rothlisberger, D. et al. Kemp elimination catalysts by computational enzyme design. Nature 453, 190-195 (2008).

[0055] 3. Yeh, H. W. et al. Red-shifted luciferase-luciferin pairs for enhanced bioluminescence imaging. Nat. Methods 14, 971-974 (2017).

[0056] 4. Love, A. C. & Prescher, J. A. Seeing (and Using) the Light: Recent Developments in Bioluminescence Technology. Cell Chemical Biology 27, 904-920 (2020).

[0057] 5. Syed, A. J. & Anderson, J. C. Applications of bioluminescence in biotechnology and beyond. Chem. Soc. Rev. 50, 5668-5705 (2021).

[0058] 6. Yeh, H.-W. & Ai, H.-W. Development and Applications of Bioluminescent and Chemiluminescent Reporters and Biosensors. Annu. Rev. Anal. Chem. 12, 129-150 (2019).

[0059] 7. Zambito, G., Chawda, C. & Mezzanotte, L. Emerging tools for bioluminescence imaging. Curr. Opin. Chem. Biol. 63, 86-94 (2021).

[0060] 8. Markova, S. V., Larionova, M. D. & Vysotski, E. S. Shining Light on the Secreted Luciferases of Marine Copepods: Current Knowledge and Applications. Photochem. Photobiol. 95, 705-721 (2019).

[0061] 9. Wu, N. et al. Solution structure of Gaussia Luciferase with five disulfide bonds and identification of a putative coelenterazine binding cavity by heteronuclear NMR. Sci. Rep. 10, (2020).

[0062] 10. Jiang, T. Y., Du, L. P. & Li, M. Y. Lighting up bioluminescence with coelenterazine: strategies and applications. Photochem. Photobiol. Sci. 15, 466-480 (2016).

[0063] 11. Shakhmin, A. et al. Coelenterazine analogues emit red-shifted bioluminescence with NanoLuc. Org. Biomol. Chem. 15, 8559-8567 (2017).

[0064] 12. Michelini, E. et al. Spectral-resolved gene technology for multiplexed bioluminescence and high-content screening. Anal. Chem. 80, 260-267 (2008).

[0065] 13. Rathbun, C. M. et al. Parallel screening for rapid identification of orthogonal bioluminescent tools. ACS Cent. Sci. 3, 1254-1261 (2017).

[0066] 14. Yeh, H.-W., Wu, T., Chen, M. & Ai, H.-W. Identification of Factors Complicating Bioluminescence Imaging. Biochemistry 58, 1689-1697 (2019).

[0067] 15. Su, Y. C. et al. Novel NanoLuc substrates enable bright two-population bioluminescence imaging in animals. Nat. Methods 17, 852-860 (2020).

[0068] 16. Lombardi, A., Pirro, F., Maglio, O., Chino, M. & DeGrado, W. F. De Novo design of four-helix bundle metalloproteins: One scaffold, diverse reactivities. Acc. Chem. Res. 52, 1148-1159 (2019).

[0069] 17. Chino, M. et al. Artificial diiron enzymes with a DE Novo designed four-helix bundle structure. Eur. J. Inorg. Chem. 2015, 3352-3352 (2015).

[0070] 18. Basler, S. et al. Efficient Lewis acid catalysis of an abiological reaction in a de novo protein scaffold. Nat. Chem. 13, 231-235 (2021).

[0071] 19. Anishchenko, I. et al. De novo protein design by deep network hallucination. Nature (2021) doi:10.1038/s41586-021-04184-w.

[0072] 20. Wang, J. et al. Scaffolding protein functional sites using deep learning. Science 377, 387-394 (2022).

[0073] 21. Norn, C. et al. Protein sequence design by conformational landscape optimization. Proc. Natl. Acad. Sci. U. S. A. 118, (2021).

[0074] 22. Yang, J. Y. et al. Improved protein structure prediction using predicted interresidue orientations. Proc. Natl. Acad. Sci. U. S. A. 117, 1496-1503 (2020).

[0075] 23. Basanta, B. et al. An enumerative algorithm for de novo design of proteins with diverse pocket structures. Proc. Natl. Acad. Sci. U. S. A. 117, 22135-22145 (2020).

[0076] 24. Loening, A. M., Fenn, T. D. & Gambhir, S. S. Crystal structures of the luciferase and green fluorescent protein from Renilla reniformis. J. Mol. Biol. 374, 1017-1028 (2007).

[0077] 25. Tomabechi, Y. et al. Crystal structure of nanoKAZ: The mutated 19 kDa component of Oplophorus luciferase catalyzing the bioluminescent reaction with coelenterazine. Biochem. Biophys. Res. Commun. 470, 88-93 (2016).

[0078] 26. Ding, B. W. & Liu, Y. J. Bioluminescence of Firefly Squid via Mechanism of Single Electron-Transfer Oxygenation and Charge-Transfer-Induced Luminescence. J. Am. Chem. Soc. 139, 1106-1119 (2017).

[0079] 27. Isobe, H., Yamanaka, S., Kuramitsu, S. & Yamaguchi, K. Regulation mechanism of spin-orbit coupling in charge-transfer-induced luminescence of imidazopyrazinone derivatives. J. Am. Chem. Soc. 130, 132-149 (2008).

[0080] 28. Kondo, H. et al. Substituent effects on the kinetics for the chemiluminescence reaction of 6-arylimidazo[1,2-a]pyrazin-3(7H)-ones (Cypridina luciferin analogues): support for the single electron transfer (SET)-oxygenation mechanism with triplet molecular oxygen. Tetrahedron Lett. 46, 7701-7704 (2005).

[0081] 29. Branchini, B. R. et al. Experimental Support for a Single Electron-Transfer Oxidation Mechanism in Firefly Bioluminescence. J. Am. Chem. Soc. 137, 7592-7595 (2015).

[0082] 30. Zubatyuk, R., Smith, J. S., Leszczynski, J. & Isayev, O. Accurate and transferable multitask prediction of chemical properties with an atoms-in-molecules neural network. Science Advances 5, (2019).

[0083] 31. Dou, J. Y. et al. De novo design of a fluorescence-activating beta-barrel. Nature 561, 485-491 (2018).

[0084] 32. Cao, L. et al. Design of protein-binding proteins from the target structure alone. Nature 605, 551-560 (2022).

[0085] 33. Jumper, J. et al. Highly accurate protein structure prediction with AlphaFold. Nature 596, 583-+ (2021).

[0086] 34. Dauparas, J. et al. Robust deep learning based protein sequence design using ProteinMPNN. bioRxiv (2022) doi:10.1101/2022.06.03.494563.

[0087] 35. Yeh, H.-W. et al. ATP-Independent Bioluminescent Reporter Variants To Improve in Vivo Imaging. ACS Chem. Biol. 14, 959-965 (2019).

[0088] 36. Bhaumik, S. & Gambhir, S. S. Optical imaging of Renilla luciferase reporter gene expression in living mice. Proc. Natl. Acad. Sci. U. S. A. 99, 377-382 (2002).

[0089] 37. Szent-Gyorgyi, C., Ballou, B. T., Dagnal, E. & Bryan, B. Cloning and characterization of new bioluminescent proteins. in Biomedical Imaging: Reporters, Dyes, and Instrumentation (eds. Bornhop, D. J., Contag, C. H. & Sevick-Muraca, E. M.) (SPIE, 1999). doi:10.1117/12.351015.

[0090] 38. Hall, M. P. et al. Engineered luciferase reporter from a deep sea shrimp utilizing a novel imidazopyrazinone substrate. ACS Chem. Biol. 7, 1848-1857 (2012).

[0091] 39. Baek, M. et al. Accurate prediction of protein structures and interactions using a three-track neural network. Science 373, 871-+ (2021).

[0092] 40. Giger, L. et al. Evolution of a designed retro-aldolase leads to complete active site remodeling. Nat. Chem. Biol. 9, 494-498 (2013).

[0093] 41. Yao, Z. et al. Multiplexed bioluminescence microscopy via phasor analysis. Nat. Methods 19, 893-898 (2022).

[0094] 42. Loening, A. M., Dragulescu-Andrasi, A. & Gambhir, S. S. A red-shifted Renilla luciferase for transient reporter-gene expression. Nat. Methods 7, 5-6 (2010).

[0095] 43. Dijkema, F. M. et al. Flash properties of Gaussia luciferase are the result of covalent inhibition after a limited number of cycles. Protein Sci. 30, 638-649 (2021).

[0096] 44. Schenkmayerova, A. et al. Engineering the protein dynamics of an ancestral luciferase. Nat. Commun. 12, (2021).

[0097] 45. Ando, Y. et al. Development of a quantitative bio/chemiluminescence spectrometer determining quantum yields: Re-examination of the aqueous luminol chemiluminescence standard. Photochem. Photobiol. 83, 1205-1210 (2007).

[0098] 46. Li, W. & Godzik, A. Cd-hit: a fast program for clustering and comparing large sets of protein or nucleotide sequences. Bioinformatics 22, 1658-1659 (2006).

[0099] 47. Farrell, D. P. et al. Deep learning enables the atomic structure determination of the Fanconi Anemia core complex from cryoEM. IUCrJ7, 881-892 (2020).

[0100] 48. Zhang, Y. & Skolnick, J. TM-align: a protein structure alignment algorithm based on the TM-score. Nucleic Acids Res. 33, 2302-2309 (2005).

[0101] 49. Needleman, S. B. & Wunsch, C. D. A general method applicable to the search for similarities in the amino acid sequence of two proteins. J. Mol. Biol. 48, 443-453 (1970).

[0102] 50. Oda, T., Lim, K. & Tomii, K. Simple adjustment of the sequence weight algorithm remarkably enhances PSI-BLAST performance. BMC Bioinformatics 18, 288 (2017).

[0103] 51. Altschul, S. F. et al. Gapped BLAST and PSI-BLAST: a new generation of protein database search programs. Nucleic Acids Res. 25, 3389-3402 (1997).

[0104] 52. Coventry, B. & Baker, D. Protein sequence optimization with a pairwise decomposable penalty for buried unsatisfied hydrogen bonds. PLoS Comput. Biol. 17, (2021).

[0105] 53. Smith, A. J. T. et al. Structural Reorganization and Preorganization in Enzyme Active Sites: Comparisons of Experimental and Theoretically Ideal Active Site Geometries in the Multistep Serine Esterase Reaction Cycle. J. Am. Chem. Soc. 130, 15361-15373 (2008).

[0106] 54. Salomon-Ferrer, R., Case, D. A. & Walker, R. C. An overview of the Amber biomolecular simulation package. Wiley Interdiscip. Rev. Comput. Mol. Sci. 3, 198-210 (2013).

[0107] 55. Kellogg, E. H., Leaver-Fay, A. & Baker, D. Role of conformational sampling in computing mutation-induced changes in protein structure and stability. Proteins 79, 830-838 (2011).

[0108] 56. Park, H. et al. Simultaneous optimization of biomolecular energy functions on features from small molecules and macromolecules. J. Chem. Theory Comput. 12, 6201-6212 (2016).

[0109] 57. Klein, J. C. et al. Multiplex pairwise assembly of array-derived DNA oligonucleotides. Nucleic Acids Res. 44, (2016).

[0110] 58. Loening, A. M., Wu, A. M. & Gambhir, S. S. Red-shifted Renilla reniformis luciferase variants for imaging in living subjects. Nat. Methods 4, 641-643 (2007).

[0111] 59. Liang, J., Feng, X., Hait, D. & Head-Gordon, M. Revisiting the performance of time-dependent density functional theory for electronic excitations: Assessment of 43 popular and recently developed functionals from rungs one to four. J. Chem. Theory Comput. 18, 3460-3473 (2022).

[0112] 60. Chai, J.-D. & Head-Gordon, M. Long-range corrected hybrid density functionals with damped atom-atom dispersion corrections. Phys. Chem. Chem. Phys. 10, 6615-6620 (2008).

[0113] 61. Ditchfield, R., Hehre, W. J. & Pople, J. A. Self-consistent molecular-orbital methods. IX. An extended Gaussian-type basis for molecular-orbital studies of organic molecules. J. Chem. Phys. 54, 724-728 (1971).

[0114] 62. Grimme, S. Exploration of chemical compound, conformer, and reaction space with meta-dynamics simulations based on tight-binding quantum chemical calculations. J. Chem. Theory Comput. 15, 2847-2862 (2019).

[0115] 63. Pracht, P., Bohle, F. & Grimme, S. Automated exploration of the low-energy chemical space with fast quantum chemical methods. Phys. Chem. Chem. Phys. 22, 7169-7192 (2020).

[0116] 64. Luchini, G., Alegre-Requena, J. V., Funes-Ardoiz, I. & Paton, R. S. GoodVibes: automated thermochemistry for heterogeneous computational chemistry data. F1000Res. 9, 291 (2020).

[0117] 65. Li, Y.-P., Gomes, J., Mallikarjun Sharada, S., Bell, A. T. & Head-Gordon, M. Improved force-field parameters for QM/MM simulations of the energies of adsorption for molecules in zeolites and a free rotor correction to the rigid rotor harmonic oscillator model for adsorption enthalpies. J. Phys. Chem. C Nanomater. Interfaces 119, 1840-1850 (2015).

[0118] 66. Götz, A. W. et al. Routine microsecond molecular dynamics simulations with AMBER on GPUs. 1. Generalized Born. J. Chem. Theory Comput. 8, 1542-1555 (2012).

[0119] 67. Becke, A. D. Density-functional thermochemistry. III. The role of exact exchange. J. Chem. Phys. 98, 5648-5652 (1993).

[0120] 68. Grimme, S., Antony, J., Ehrlich, S. & Krieg, H. A consistent and accurate ab initio parametrization of density functional dispersion correction (DFT-D) for the 94 elements H-Pu. J. Chem. Phys. 132, 154104 (2010).

[0121] 69. Grimme, S., Ehrlich, S. & Goerigk, L. Effect of the damping function in dispersion corrected density functional theory. J. Comput. Chem. 32, 1456-1465 (2011).

[0122] 70. Meiler, J. & Baker, D. ROSETTALIGAND: Protein-small molecule docking with full side-chain flexibility. Proteins 65, 538-548 (2006).

[0123] 71. Davis, I. W. & Baker, D. RosettaLigand docking with full ligand and receptor flexibility. J. Mol. Biol. 385, 381-392 (2009).

[0124] 72. Davis, I. W., Raha, K., Head, M. S. & Baker, D. Blind docking of pharmaceutically relevant compounds using RosettaLigand. Protein Sci. 18, 1998-2002 (2009).

[0125] 73. Wang, J., Wolf, R. M., Caldwell, J. W., Kollman, P. A. & Case, D. A. Development and testing of a general amber force field. J. Comput. Chem. 25, 1157-1174 (2004).

[0126] 74. Bayly, C. I., Cieplak, P., Cornell, W. & Kollman, P. A. A well-behaved electrostatic potential based method using charge restraints for deriving atomic charges: the RESP model. J. Phys. Chem. 97, 10269-10280 (1993).

[0127] 75. Besler, B. H., Merz, K. M. & Kollman, P. A. Atomic charges derived from semiempirical methods. J. Comput. Chem. 11, 431-439 (1990).

[0128] 76. Singh, U. C. & Kollman, P. A. An approach to computing electrostatic charges for molecules. J. Comput. Chem. 5, 129-145 (1984).

[0129] 77. Jorgensen, W. L., Chandrasekhar, J., Madura, J. D., Impey, R. W. & Klein, M. L. Comparison of simple potential functions for simulating liquid water. J. Chem. Phys. 79, 926-935 (1983).

[0130] 78. Maier, J. A. et al. Ffl4SB: Improving the accuracy of protein side chain and backbone parameters from ff99SB. J. Chem. Theory Comput. 11, 3696-3713 (2015).

[0131] 79. Darden, T., York, D. & Pedersen, L. Particle mesh Ewald: AnN·log(N) method for Ewald sums in large systems. J. Chem. Phys. 98, 10089-10092 (1993).

[0132] 80. Roe, D. R. & Cheatham, T. E., III. PTRAJ and CPPTRAJ: Software for processing and analysis of molecular dynamics trajectory data. J. Chem. Theory Comput. 9, 3084-3095 (2013).

We claim:

1. A polypeptide comprising an amino acid sequence at least 35%, 40%, 45%, 50%, 55%, 60%, 65%, 70%, 75%, 80%, 85%, 90%, 91%, 92%, 93%, 94%, 95%, 96%, 97%, 98%, 99%, or 100% identical to the amino acid sequence selected from the group consisting of SEQ ID NO:1-1615, not including any functional domains added fused to the protein (whether N-terminal, C-terminal, or internal), and wherein the 1, 2, 3, 4, or 5 N-terminal and/or C-terminal amino acid residues may be present or absent when considering the percent identity.

2. The polypeptide of claim 1, wherein 1, 2, 3, 4, or 5 N-terminal and/or C-terminal amino acid residues are absent and are not included when determining the percent identity relative to the reference amino acid sequence.

3. The polypeptide of claim 1, wherein all amino acid residues in the reference sequences are included when determining the percent identity relative to the reference protein.

4. The polypeptide of claim 1, wherein the polypeptide comprises the secondary structure arrangement H1-L1-H2-L2-E1-L3-E2-L4-H3-L5-E3-L6-E4-L7-E5-L8-E6, wherein “H” is a helical domain, “L” is a loop domain, and “E” is a beta strand domain.

5. The polypeptide of claim 4, wherein domain H1 is 19 amino acids in length, domain H2 is 7 amino acids in length, domain H3 is 14 amino acids in length, domain E1 is 4 amino acids in length, domain E2 is 4 amino acids in length, domain E3 is 10 amino acids in length, domain E4 is 12 amino acids in length, domain E5 is 14 amino acids in length, and domain E6 is 13 amino acids in length.

6. A fusion protein comprising the polypeptide of claim 1 fused to one or more functional polypeptides.

7. The fusion protein of claim 6, wherein the one or more functional polypeptides are fused to the N-terminus and/or C-terminus of the polypeptide.

8. The fusion protein of claim 5, wherein one or more functional polypeptides are inserted internally into the protein.

9. The fusion protein of claim 8, wherein the polypeptide comprises the secondary structure arrangement H1-L1-H2-L2-E1-L3-E2-L4-H3-L5-E3-L6-E4-L7-E5-L8-E6, wherein “H” is a helical domain, “L” is a loop domain, and “E” is a beta strand domain, and wherein each of the one or more functional polypeptide inserted internally into the polypeptide is inserted into a loop domain.

10. A nucleic acid encoding the protein or fusion protein of claim 1.

11. An expression vector comprising the nucleic acid of claim 10 operatively linked to a suitable control sequence.

12. A host cell comprising the expression vector of claim 11.

13. A library comprising 5, 10, 35, 50, 100, 250, 500, 750, 1000, or more different polypeptides according to claim 1.

14. A method for using the library of claim 1 for identifying or designing enzymes or small molecule binders.

The application's sequence listing, which the Patent Office published only in electronic form, follows.

SEQUENCE LISTING (1615 sequences)

SEQ ID NO: 1 - protein, 116 aa, synthetic construct
PSEEEIKEFLRRFYEAINRGDADAVKELLTPGWTYHHASGQTFTDQEEFREWVEKMFKAGTRLQIDEIRIDGKTVTVHVTMHQTRGNQDHTIRTTDHHRFHDDGKLVETRAHYNHE

SEQ ID NO: 2 - protein, 116 aa, synthetic construct
ASEEEIRELIRRFYEAFNKGDMEKLKEILAPGAQLHISNGQTFNDLEEITKFFQTMLSQGTKIEIKSIEVRGDTVTVHVTFHTTHGNQDHTVDVTDHYHFDKDGKIRRLQSHFNPR

SEQ ID NO: 3 - protein, 116 aa, synthetic construct
PSEEEIRRMVRRFFEAFNRNDADALARLFHPGAQMHVSNGQTFNDREEIKEWFERLLSQDVQIEIHSIEVRGNTVTVHWTGHMNQGNQTKTVTATTHFHLVKDGKIVEMRIHINQQ

SEQ ID NO: 4 - protein, 116 aa, synthetic construct
MSEEEIKEILHALYEAFNRGDMDAFAEYFAPGAQMHISNGQTFNDREEIKEFFAQLFKQGVQIEIKEIRIDGDTATVHVEVHRTHGNQDHTYTVTHHWVFRKDGKVVELRQHVNPQ

SEQ ID NO: 5 - protein, 119 aa, synthetic construct
DFKEEVKRVLKEFYEALDKKDIDTAASFFTDDSTMHVQEGTTFKNKEEIKKWFKEFLDTFPRMHREIKSIHITGDKVTIHVTIHVTHGDRDYTYHITEHHRLDKDGRIKETHIHTNQQN

SEQ ID NO: 6 - protein, 119 aa, synthetic construct
DFQEQVKEWIKRFVEALDKGDVEKVVSLFTDDWTFHLYQGQTFTNPEEFKEWVERFLRTFKRMHREIKEIRVEGDRATVHVTVHLTQGDRDYTVHVTEHHKFDKDGRITHTQMHENEQK

SEQ ID NO: 7 - protein, 119 aa, synthetic construct
PDEEAIREWLRQFFRALDEGDMDKAMSLLSDDVTVHFYEGYTATTKDEIKEWFARWYSKFPQMHRQIDSIEITGKTVHVHWTIHLHQGDQTYTYRATTTFHFDHDGRIKEIRITIREEK

SEQ ID NO: 8 - protein, 120 aa, synthetic construct
PISEEEIKDWVRRFIEAFNKRDADALKSLYSDDSTIHFGDGRTFTNPEEFAKWVKEYLRHSDTRLEIKSIEIHGNTVTVHVQMHTTHPSGQTYTYRVTRHITFDHDGKIKEDHIQTDQLH

SEQ ID NO: 9 - protein, 120 aa, synthetic construct
SLSEEQIKELLKRFYEAFNRNDADALAELLHPDATMHLSDGSTFHNVEEILKWFREFMKKSDVQIDVKEIEIRGDTVTVHYTMTVNHPSGQTHTVDGRDHFTFDHNGKIVEVRSHYQPQS

SEQ ID NO: 10 - protein, 118 aa, synthetic construct
PSAEEIIRELKKRLVEAMNKGDMDKLRELVHDDAQFHFNGQTFHDKEEFLEWFAQTSPVKIQIDELHIQQNDDGTYTVTVHVTMHNDDEGKTVRVTAHDRYDMRHNKLVETRFHTDQG

SEQ ID NO: 11 - protein, 118 aa, synthetic construct
PSDEEIVRELVRRFYEALNNGDADTAKSLLHDDWRLHVDGRTFNSPDEWIEWVKRVPQLHHEIKSLEVRVNHDGTVTVTVHVTVHDSSKNTTHRFTDHHHVDSRHNKIVRTQVHTDNG

SEQ ID NO: 12 - protein, 118 aa, synthetic construct
PSDEEVARELVRRFIEAWNKKDLDTMFSLLHPDWQYTQNGRTFHSRDEFKEWVRTHPDLKVEVDSIEVRTNPDGTVTVHVEVTARDDTTNQDIKFHEEHHVDSRHNKIVETRQHEDQG

SEQ ID NO: 13 - protein, 118 aa, synthetic construct
PSDEEIVRELIRRLYEAINRGDMKEIFDLLHPDWQFTNNGTTAHSREEFIERLKKRDQFHVHVDDLHVQINHDGTVTVEVHVTVTDSKTNRHFKVRDEHHFDSRHNKLVETRVHTDPG

SEQ ID NO: 14 - protein, 118 aa, synthetic construct
PSDEEIIKELVRQFYEAVNNNDMDTLRELLHPDATFTFNGRTFHDVDEFLKWVQDIPQTHHEIKSIEVRVHDDGTITVTVHVTTTDESTKTTVTVHDHYTVDKRHWKIVRVQSHEDKG

SEQ ID NO: 15 - protein, 118 aa, synthetic construct
PSDEEIARELVKRFYEAFDKKNMDELHEMLHPDWQYTQDGNTWHSREEFLKWASNVPQLRHEIKELHVQTNPDGTITVTVHVEVHDSSTNRTVNVTDHHRIDKRTNKIVETRSHTDNT

SEQ ID NO: 16 - protein, 121 aa, synthetic construct
PMSKEEVKEVLRRFFEAINKNDRDTMKELLDDDWEFHSSSGRTFHGADEFLEWITQWASTAQIEIKSIEIEIRGDTIHVTVHVTVHETHGNQTHTVDVTEHHRLDARNNKIVETRVHFNQR

SEQ ID NO: 17 - protein, 121 aa, synthetic construct
VSDEQQERAKQAIERFIEAMNKDPEEVYKLLAPGWRYTDSSTGRTFDKDEFKEMVEKLFKQNFHFQIESIRVELNPDGTITAHVTVQVTNDSTGSTVTVHETHHLDSRTGQIVETRVTPTG

SEQ ID NO: 18 - protein, 122 aa, synthetic construct
PSDEQQIRDWLKKFYEAWNNNDLDALVELLTPDWTYHHSSGQTYTTLDEFREWVERMLSQDTQINMEEMRIEFDGDTATVTVHYTATNGSTKTTYKATETHHFERDKDGWKIVETRVHHHQT

SEQ ID NO: 19 - protein, 122 aa, synthetic construct
PSDEEAIRELARRFYEAFNTKDADALVEMYDPNWTYHHSSGRTFTTLDEFKEWVERFLSSDVRLEIKSMEVEVRGDEATVTVEVDVTQRQTGRTFHAHDTHHFRRTKDGWKLIETRTHTHQA

SEQ ID NO: 20 - protein, 122 aa, synthetic construct
PSDEEAIRELKRRFIEAFNNKDADALARLFHPDAQMHTSNGQTFNTKDEIKKFLEDLLKQDIRIELKSVEIEVRGDTIHVTFHVTVTNSSTGRTWDGTQHDEYRKEPGGWKLVRTEERLNQK

SEQ ID NO: 21 - protein, 122 aa, synthetic construct
PSDEQIIRDWVRRWVELLNRGDADAVASLYAPDATVHHHDGRTLTSREEIKEWVEEMFSRQVEVHLDSLEIEFRGDKATVHAHLTFTEQRTKRTFKGTATFHFQRTKDGWQLKEQHVHIHQT

SEQ ID NO: 22 - protein, 122 aa, synthetic construct
PSDEEQIRELVKRLYDALNNGDWEAFASLFHPDAQFHHASGRTLHTLEEIKEWAKQFLSNNIRIEIKEIRIEINGNTITVTVHVTVTNAKTKETFEVTETHHFRKDEGGWYLVRTEVHIRKL

SEQ ID NO: 23 - protein, 121 aa, synthetic construct
PEVEEAVRELKKRFVEAFNKGDLEALERMFHDDATMHVSNGQEYHSKEEIKEWIKRFLSNDARVEVSIEVQIVNGDEATATSHFHVTYRNGQTYTGTAHDFYRRKDGTWKIIRVELQWHQN

SEQ ID NO: 24 - protein, 121 aa, synthetic construct
HEIEERIREIIKRLIEAIDRGDLDALEEIYDDDAQMHISDGITFNNKEEIKEWLKRYSSFRTAHEVHVEVHIRNDSHVTVHVTVHYTHENGQHFTVHRTFHFQFENGQVKLKEDRIQRDRQ

SEQ ID NO: 25 - protein, 129 aa, synthetic construct
MSEQEIREAIREWLRRYYEAFDNGDWEKLSRLMAPDIRMEYNGRTFTNLEEILRFLREFWEKFNTAHEVHIEIHIDDKDTTTVTVEVHVTLHHNGKTFSTTAQHHWHVEFHGRQLRFKEVRTQTHESPQ

SEQ ID NO: 26 - protein, 129 aa, synthetic construct
MSEEEIREAIKETLRRFYEALDNNDLDTLRSILHPDWQMHYNGEQFTNREEFAEWVDKFWKNWDSRHDVEIHIDMSDDSTTTATVHVHVTFHHNGQQFHVTVDDTHHFRMEGNELKMIETRSQTRENKD

SEQ ID NO: 27 - protein, 122 aa, synthetic construct
ASEEEIRQIIKRLARALDEGDWDTLAKLYSDDSRIEENQDNGTTIEFTTREEFIRWVREFKKNAEVHREVHIHVDKSTNTATAHMKVHVTHGNKSITMDVTSHFHFTDGKLKEEQVHIRAQE

SEQ ID NO: 28 - protein, 119 aa, synthetic construct
MSKEEIKRILKQFFEAMDKGDADKLKKLLHPGATFHLANGQTFTDVDEFVKWVEDFFNNVQLHREVHIHIHPNGRTVHVEWTLHLRHGDTKYTIHGRTTFHFKDGKIAEVRFHWDTQET

SEQ ID NO: 29 - protein, 117 aa, synthetic construct
PDEEKIRQIVEALVEAINHGDLDALESFYTDDSTMHFNEGETLTNREEIKRWFEEFIKKFNVRIEIKSVHVDGKTITVNVTVHLTHNGRTVTYHVQRHFRVEGDKLTDDHIHRNQTE

SEQ ID NO: 30 - protein, 121 aa, synthetic construct
SSEEEIREILRRLFEAFDKGDLDELKELFHDGWTFHDPSGQTFTTKDEFKEWVKRLLESLSDIKRGDIEIRVQDDGTVTVHVTVHVTDSRTGRTVTIDYTEHHHFRNGKLTETHVHSHQKS

SEQ ID NO: 31 - protein, 118 aa, synthetic construct
DDREEIKDIIRKFFEAFENGDADKLKELLAEDATFHLYQGITFKSLDEIREWAERLFSTAEFRFDSIEIHIHDDGTATVHWTMTVHHDNQTFHFNATTHFVFENGKIKEVRIHADNTD

SEQ ID NO: 32 - protein, 118 aa, synthetic construct
DRREEIKDWLRRFYEAFEKGDWEKLARLMDDDATFHLYQGITFTDKEEFIRWFREFISNAEVRFDEIRFHINDDGTATVHYTVTVHHDNKTIHANATDHFVFSDGKVTEIRSHADNQE

SEQ ID NO: 33 - protein, 118 aa, synthetic construct
DDREKIKEFIKEFFEAFQNGDADRLKELMAEDATFHFSNGTTFTNPEEFREFVERFFSRMDIKIDRIEIHINDDGTATAHVEITVTHDDRTHHVTVTVHDRYVDDKLKERRFHYDNKN

SEQ ID NO: 34 - protein, 118 aa, synthetic construct
PFREEIKDWKRRFIEAFEKGDMDKLKELFAEDATVHFWNGETATTLDEIKEWFTRLWSTAEFRFEEVRIHIRDDGTVTVHMRVTVRHDNEDRTARYTVHDRYRDGKLTETQFHTDQDR

SEQ ID NO: 35 - protein, 118 aa, synthetic construct
PDEEEIRDTVRRYYEAFEKGDAEALAELFHDDATFHVSEGITFTTKDEFKEYVSQLLRNAEYRFDSIEIHINDDGTVTAHYTVTVHHSDRTIHINATDHFHFSDKYIQELRSHFDRQE

SEQ ID NO: 36 - protein, 118 aa, synthetic construct
DDRERIKEWLRRYFEAFEKGDADALKSLFTDDWTFHHSSGRTFTSRDEFKEWFKEIMKNAEYRIDEIRIHINDDGTVTVHVKITVTHDNKTVTMDVTEHHRFTNDRIVETRVHIDNKQ

SEQ ID NO: 37 - protein, 118 aa, synthetic construct
PWEERIKELLKRFYEALQNGDADALAELMSDDVQFHHSSGTTFDSKEQFREWVERLFSSADFKIDSIEIRFNDDGTVTVHVTVTVHHDNKTIHINATHHWVFRDGKVTRVEARLDNTE

SEQ ID NO: 38 - protein, 117 aa, synthetic construct
PSEEQLRELLKRFYTAINNGDLDALKELLHDGWQFHSSSGRTFHTKEEFAEWVERMLSNNTRLQIDSMNADQTEPRATVHVTFHTNEGNQTKTVHVTEHHRFKDGKIVETRQHHHTG

SEQ ID NO: 39 - protein, 115 aa, synthetic construct
PTEEEIKEWVKQYFEAMQNKDVDKLVSLYDPGVQVHFWSGQTFNDREELKEWYERWFSQFEDAQMEIHVEIRGDRVTVHIHVTNPSTKTTTTYTFHFQFSDGRITEVHIHRNDHE

SEQ ID NO: 40 - protein, 122 aa, synthetic construct
QDEDEKRIKDFIRRFAEAVDKGDWETLRRLLHDDWRFHHSSNIQFDNPEEFVRWYIERFRKEFDEVHRQIDSIEIHGQTATVHMTAHFTRGNKTFTVHVTEHHHFRDGRLVETHVHYDEKET

SEQ ID NO: 41 - protein, 122 aa, synthetic construct
PDENEEAIKELVRRFFEALDNNDRDTFKSLFHDDAEFHLSDNITFSNADEFVEFFFEKFAREFERVRHEIHSIEIRGNRVRVEWTAHFTRGHKDVTIHGTTTFQVRDGKITRVEIHFDSKDT

SEQ ID NO: 42 - protein, 120 aa, synthetic construct
PKEDEEAIKEFKRQLVEAFNHKDMDTIKELLTPDIEVHVSDGITFTNLDEFVKWFADKFLKHSDFRMQITEIRIHGHKVTVHVEVHWSHNGSSRTVRVTVHDRYRNGKITSTEFHWHNEN

SEQ ID NO: 43 - protein, 120 aa, synthetic construct
MSEEEIKETIKRLMEAFDKGDMDTVASLFHPDAQFHISEGITFDNLEEFVEWWFQKFARKITRAHREIKSIEIRGDTVTVRWTVTVTNKDTNTTRHIEGRTTFHFKDGKITEVHFHEKQD

SEQ ID NO: 44 - protein, 120 aa, synthetic construct
MSEEQIKEWLKRFYEAMDNHDWEALKRLYAEDATFHVSEGITFSNRDEFIEWWFRKFASTIDKSQHDIDSIHIDGDTVTVHVTQHVHHKDTGETRTVKITQHFRFKDGKLKEDRIHHDQS

SEQ ID NO: 45 - protein, 120 aa, synthetic construct
TSEEQIEELARRMYEAFDKGDWDALLKLVHPDATFHVSEGITFDNAEEFVKWWFEKWRRHVSDMKREIKSIEIRGDRVTVHVEVHVTHKDTGTTVTIRATHHWVFKDGKIVEVHMHYDQS

SEQ ID NO: 46 - protein, 118 aa, synthetic construct
PSDEEQLKEFKKRFIEALNRGDWKAVAELMSEDFTYYDARTGQTYDYEQFVKMVREFLSKAKDLRIEIKEIRIHGDTVTVHVEFHATHNGETRTVDVTTHDHYKDGKLKETRFHHNHQ

SEQ ID NO: 47 - protein, 118 aa, synthetic construct
PSDKEQIKEWLRRFYEAFDHGDVEAVAELFSEDAQFTDARRQQTYDYEEFKEMVERMLSQMKDVRHQIDSIHIHGHTVTVHVTVHFTHNGKKVTVDVTEHHEFRNGRIVRTQTHHHPR

SEQ ID NO: 48 - protein, 118 aa, synthetic construct
TDESEIRELVKRYFEALNKGDLDTVVSLFTPDATIHIYNGETITSLEEFREWVRKFLEDAKDVRFEIKEIRVDGDTVTVHWTVHMTHGNRTYTYRATTHFVFVNGKIKEMRIHMEQQH

SEQ ID NO: 49 - protein, 124 aa, synthetic construct
PEEEELRKQVEEWLRQFYEAINKGDLEKLKELIDPEQSTFHFNGQTYNFEQFIEIVEKLFRNDIKLEVKQIDIEINDNGTITVTVHVTTHHKDGKTSDSTDHYHFRVENGQLKLVSVESHRQPT

SEQ ID NO: 50 - protein, 124 aa, synthetic construct
PEEDERKEQVKELVRRLVEAFNRGDMDALKELFTDDDWSFHQNGQQFDADEFIKMLKELFDNGVRIEVKSIEIRVHPNGEVTVTVHVEITFSDGSHLDATEHHHFRKENGQIKLIETRVTHQPK

SEQ ID NO: 51 - protein, 118 aa, synthetic construct
ASKHEIEEIARRFYEAFDKGDLDKLSELLHPGVRIHFEEEQITFTDKEEFQEWYKEWKKRFQEAHREIKRIEINDGTVTVHVTVHVRHGDETYTYHVTHHWHLKDHKIVEVRIRVDQT

SEQ ID NO: 52 - protein, 118 aa, synthetic construct
MSEEDIREWKKRFVEALDKGDWEKLHELLHPGARIHYEKYQITFTDREEFIRWYKRLYSQFEEVRREIKEIRVDGGRVTVHLQFHVRHGDETKTYRVTVHDEYRGKKLVSSRFRWDDT

SEQ ID NO: 53 - protein, 116 aa, synthetic construct
MSEEEIRQIIKRFVEAFNNGDIDTAVDLLYTPDAEVHHSNGQTFHTRESIKKFLKELYKQGTHIEIKDLHVDGDTVTVHVQLHTHHDGQTRTVRVTSHFHFVNKRVTHEQQHYDSN

SEQ ID NO: 54 - protein, 116 aa, synthetic construct
ASKEQIEEFLKTYYELFNRGDYEAAAEFIYTKDWRFHNNNGETLNTKESVKEWLRKLLSRGTQIQIDSLEVRGDTVTVHLTFTTHDDGETHHVRVTEHHTFQGNRIVRTQQHSDTG

SEQ ID NO: 55 - protein, 116 aa, synthetic construct
PGEEAIREWIKRYVEAFNNNDLDALASLYAPGATVTFSARGETATDQEEIKKWYEEFLSQDIRVEVKSIHITDDTVTVHVTFQKRDSHQTKTVDVTVHFRFENTKLTEVRYHFNEQ

SEQ ID NO: 56 - protein, 116 aa, synthetic construct
TDEEQIKDFIKKFYEAFNDWEKFREFIDDNVTFHFEQHQQTFTDKEEVVDYIRKWLESVKSFRLEIKSLEIRGDTVTTHVTIHVNHKDQTRTFHVTEHHTFKDGKLVETRQHVHQT

SEQ ID NO: 57 - protein, 117 aa, synthetic construct
ASEEEIRRWIKRFYEAFDRGDADALKEMLAEGWQMHQTRNITFDTLDEFKEWVERFQRHTDAHREIKSIRVDGQTVEVHVTMHTRHGDQPKTISVTDTHHFNGRKITSTRAHFDGND

SEQ ID NO: 58 - protein, 117 aa, synthetic construct
PSEEQLREWVKRFVEAFNNNDLDALRELFDDGVQVHFSKGITFHTREEFAEWVRELLEKTNMRIEIKSIRVDGQTVHVHWTAHWTHGDQPYTSHGTTTFHFGGQKLVEVRFNVDDEE

SEQ ID NO: 59 - protein, 117 aa, synthetic construct
PEQEEKIRELIKRFAEAFQKGDMDALFELFHPDATYHDSNGQTFHSREEIKEWYERWFSQDWVVEIKEIRINHENNTVTVHMQYHLRRNNQTVNVTYHDRYRGDKLVERQTHRDEGG

SEQ ID NO: 60 - protein, 118 aa, synthetic construct
TSEEEIREILRRFYEALDKGDLDALEELLTPDWQFHSSNSTLHNIEEFKEWVERWFKSVGEVRREIEEIRITGNHVTVHVTVHVTHNGKEVTVRVTDHHHFKDGKLVETRAHYDNHEK

SEQ ID NO: 61 - protein, 118 aa, synthetic construct
SSEEQIREFLKRFYEAVDRGDMDKLRELLTPDIQVTFNTETLHNVEEVVDWFREMFERLSDVHREIKRIEVSDGEVTAHVQVHVNHNGKTVTMDVTDHYRFKDGKLVSMRSHTDNRES

SEQ ID NO: 62 - protein, 123 aa, synthetic construct
PVSEEQLRDWVRRFFEALNKRDLDTLVSLFTPDWQFHHISGVTIHSLEELREWVERWLRTFSDFRIEIDSIEIHGDTIHVHVTIHFTDDRTGRTFTVRITETHHFDKGGKLKETHVHEDRQPK

SEQ ID NO: 63 - protein, 121 aa, synthetic construct
ADREKIKELLKRFFEALDKGDFDTLKSLMHDDWTVHITHNGQTFTITTREEFEEYYRQLFESVKDVQRHIHSIEIHGDTVTVHFTVTQRHGDKTYHIDITEHHRFEGDKLVETHVHVDHKQ

SEQ ID NO: 64 - protein, 120 aa, synthetic construct
PLSQEQIKEWLKRFYEALDRGDADAVAELVTDDWTMHINNGITITTKEEFKEWVERRLSQFSDIKRTLEEIRIDDRTVHVHLTVHTTHNGKKVTIHTTDTHHFTDNRLTETHFTEDQKDT

SEQ ID NO: 65 - protein, 118 aa, synthetic construct
DWREEAEELLRRLYEALDKGDRDKIREILHPDVQYHDSNGITLHTLEEFIEYVTRLLSRFDFQRHIHEIRFSDDGTVTVHYTMHFTHGDQTYTATVTDHFHFTNGKITEVRSHVDQHE

SEQ ID NO: 66 - protein, 118 aa, synthetic construct
DFREEIKDLIKKFYEAIDHRDRDKLREIVHPDATFHLSEGITFTNREEFEEWVEQVQSHFDTRHQIDEIRIDDSGTVTVHVTVTRHHGDKTQHIRVTEHHRFTDGKIAETRVHFHEER

SEQ ID NO: 67 - protein, 122 aa, synthetic construct
PQPDQERIEEIVRQLYEAFDKGDLDTIASLLHPDVQVHINRDDETITFNDLEELKEWIERWRSNFDVQRHIDRIEIRGNTVTVHVTIHTTHNGQNYTIHATHHWTFKDGRITRVEAHFRTQE

SEQ ID NO: 68 - protein, 118 aa, synthetic construct
PSEEEIKEFKRRLIEELWSTRDASAAERYMHPDATYHNSTQTFTNKEEIREFIQQLLERYKRIHVQIDEIRIDGDTATFHVTLQFHHKDGTVHVHVTYHDRYEGKRLKESRAHEDQHD

SEQ ID NO: 69 - protein, 118 aa, synthetic construct
MSEEEIEEWKRRVVDAFFRNQDAESWAQYYHPDARYSYNNRTFTNMEEIKRWLEEFLSRVKRAHVQLDQVDVDGDTATFHFTAHFHHDNGTVTVHYTVHDRYEGNKLTETQTHTDQHD

SEQ ID NO: 70 - protein, 118 aa, synthetic construct
MSEEEIKEWVRRMIEAVWSTKDWNAFLSFYTPDATMHYNDQTFTTLEEIRRFVEQVLKEAKQTHVQFDKMDVDGDTVTVHVTIHVHHDNGTVTIHVTRHFEFRGNKLKRDQSHEDQRD

SEQ ID NO: 71 - protein, 118 aa, synthetic construct
MSQEEIEEWKRRVMDIVFRTKDADAFAELYHPDATVHNGDTTYTDPDEIIKFVREFMSRAKQVHVQIDRVEIDGDTATFHVTITVHHKDGTVHIRVTAHDRYKDNRITETQYDYDQKD

SEQ ID NO: 72 - protein, 118 aa, synthetic construct
PSEEEIKEWVTRMVEAVFKRNDYSIWLSLVSDDWQLHVNTQTFTTKDEVREWLKKWISDVKQVHIQLDEVRVDGDTATFHFTVHVHHDNGTVTFDQTEHHRFEGNRITETRQHTDQKN

SEQ ID NO: 73 - protein, 118 aa, synthetic construct
PSREEIKEFKRRAIEAFWSNRNADIWLELYDKDATMHVDNRTFTDKDEIKEWLERMLSRHKRAHVQIDEIRVHGDTATVHVTLHFHHDNGTVTTRATYHDRYEGKKITESREHRDTHE

SEQ ID NO: 74 - protein, 119 aa, synthetic construct
PTDRSEIKEIIEREIEAFNRRDLDKWASLFHPDATMHLYNGRTFSTLDEIKEWFEKMMSSMRDFRIEVKSIEIHGDTAHVTMTMHVRNDSKDVTINYHVTIHFRNGKIVEKHIRADHQD

SEQ ID NO: 75 - protein, 118 aa, synthetic construct
PGEEAIKEIITRWYEAFDKTGDAETLAQLLHPDWQFHYNGQRFTNLEEFKEWVERFLKRFPDSEHRIERIEVHGDTVTVHLTVHVRHGDQTVRLPTTDTHRLKDGKIVETHVHTGGDH

SEQ ID NO: 76 - protein, 120 aa, synthetic construct
MSQEEIKELDRRRAEEAFQKKDPDAFISYFHPGATMHINNGQTFTTLEEIKEWFERFLKEMQDAQIEIKSIEVRGQRVTVHGTITVHRDNKTVTIHMTYTDEYRDGKLTHSEIHIDEQPT

SEQ ID NO: 77 - protein, 120 aa, synthetic construct
PSQEEIKEWLRRYIEYVFQTGDADAAAKMIHPGWTFHHSSGQTFTDLEEFKEWVKRYQESMQDVQVQIDSIEVHGDRATVHMTLTVHTPTQTFQIHVTEHHQFKDGKITETHQHEDNQPT

SEQ ID NO: 78 - protein, 121 aa, synthetic construct
DEKDEQALKEFKERFIREVWEKKDADVFVKYIDKDAQFHFSSQTFHNQEEIKEWVQRWFEERVKDAQVEIKRIEFHGKRVTVHVEVHVNHDDGTVTYRYTYHDEYQDGRLKHTTVHEHQHD

SEQ ID NO: 79 - protein, 121 aa, synthetic construct
PEKDQRAIEEWVRRWYERVWRTGDWDQLAKMLTPDWTVHYNDRTFHDRDEFAKWWREMFEKTFKRVQVQIDRVEIHGDRVTVHVTVHRTSDSGDYTIHTTDHHQFRNGRIVETHIHTDDRS

SEQ ID NO: 80 - protein, 122 aa, synthetic construct
LDPSQEEQIRQWFRRYYEAMNKGDLETLERLFHDDWTQHFSNGQTITTKEQLKEYIKQITDRNVQIEVHVEIHFHGTDHATVTVHITLHENGSTVHVTEHHHFEFTNGSLKIKETRTTIHGE

SEQ ID NO: 81 - protein, 122 aa, synthetic construct
PDPSQQEAIKELKTRLVEALNKGDWETFRSLFHPDATMHLSNGRTFTTLDEIVDWFRKMTSNDVKIEVHINIDAIGRDTVQVHVTLHLHYNGQTFTVHATDHYQFTNGQLRIIETQFNYHGS

SEQ ID NO: 82 - protein, 122 aa, synthetic construct
ADPSQQEQIKEWIRRFVEAFNKGDMETIKELYHDDATVHNYNGRTFTTKEEIVEYIKQLTDQDMKIEVHIEIHFHGNTHATVHVHLTMHARGQQYHFQSTFFFEFTDGKLFLKEERVTTRGS

SEQ ID NO: 83 - protein, 122 aa, synthetic construct
VDEEQEKQVREWIRRFYEALNTGDMDALKSLYDDDATMHIANGRTFTNPEEIVKWFKEFSDQNWQLHVEVHIEMDGTDTVTVTAHVQAHGNDQTFNITQHFHFEVTDGRLFLKEDRIHRHGS

SEQ ID NO: 84 - protein, 116 aa, synthetic construct
PMTAEQVVRAFWEAFQKGDWKKLLDMITPGWTLHISQGTTYHSLEEMRRWFEEFQKNNEQMHIQIHRVEVHGDTVTVHMTIHVTHNGETRTYHVTEHHTLSKDGKIVETRQQHDST

SEQ ID NO: 85 - protein, 116 aa, synthetic construct
PVSAEQVAKRFAEAIAKKDLDELASIYADGATFHVNNGITYKSKEEIKKWWEEMLSNFPELHIQIDRIEVHGDTITVHVTMHTTHNGQQVTFHITSHFTFDKDGRLKSEHFHMNPT

SEQ ID NO: 86 - protein, 116 aa, synthetic construct
PMTAEQVARFYWEAFQKRDLDAFAEIFHPGATLHIWKGITYHNPEEIKRAFEQWMKEFPQFHIQIEEIRVHGDTVTVHWTVTVHHNGQQYHFHATTHIRLDHNGKIKETRFHVHST

SEQ ID NO: 87 - protein, 116 aa, synthetic construct
PETAEQVVRKVEEAFNKGDRELFDKMLHPGWQLHHNSGHTWTSKEEVKEWFDRWLKNHPRFHIQVDRVEVHGDTVTVHMTVTTHHNGQQYDFSVTEHHHLSKDGKLTETRQQRDPT

SEQ ID NO: 88 - protein, 116 aa, synthetic construct
PMTAEQFARAFADALNRGDLDALRRIYHPGATLHIYQGITFHNLDEIKDWFKKWFSQFEEVHFEIKRIEVDGDTVTVHFTVHVTHNGETRTIHVTSHFELSKDGKLVSEHIHENST

SEQ ID NO: 89 - protein, 116 aa, synthetic construct
PITVEQFVRTLEEALNKGDLDALARLYHPGATMHINNGETYHNLEEIKKWFKEFFESFQETHFQVDEVRVEGDTVTVHVTVHATRNGKTVTMHATSHIEFSKDGKIVSEEIRIHGS

SEQ ID NO: 90 - protein, 118 aa, synthetic construct
PSEEELKEIKKRFAEEAFNTGQWEKFAEFFHPDATMHINNGTTYTDKEEITRWFQELMSNFPDVRVEIKSIEVRGDTVTSHMTIHVNRNGQTFTFSVTTTDHYKDGKLTETHIHIHGD

SEQ ID NO: 91 - protein, 123 aa, synthetic construct
PSEEELKTAAKEAVEREVEAFNKGDMDAWKELFHPDATMHNSNGQTYTTLDELKRWVKKLFDNNIRVEFEVEVHIVDSKEVEVHVHFHFHNPDGTTMTVTATDRFRREDSQYFIVERHIHHYE

SEQ ID NO: 92 - protein, 126 aa, synthetic construct
DKEEEIKQWIKEWYERWITAVNQKDVDKALSLFHEDVTIHYQNGQTYTTKDEVKEWLTQFISRVERIELKSMEIRIDGDTVTVHVHITFTNRQTGRTFHVDITHHWQFKDGKIVSVHEKRDRTDTD

SEQ ID NO: 93 - protein, 126 aa, synthetic construct
DKEEEMKRLIRELIERYVDALNRKDRDAAAEMFHPDWQFQEASGQTFHSLEEWKEWVTQLMSEVTTIQIRHIEIHIDGDTATVRVTIEITHSKTGRTTRFRQDEHHEFRNGKIHRTRTKRDPTRTD

SEQ ID NO: 94 - protein, 119 aa, synthetic construct
TSEEQIEEWLRQYYTAINNGDMDAVRELVHPDATFHESNGQQFDTRDQIVEFIERFWKTFADVHIDMKSFEITDNHVTVHYQVHTHHQDGKRVTFDGTDHFQFKDGKLTRLESNRDQKD

SEQ ID NO: 95 - protein, 125 aa, synthetic construct
MSEEEIERAVREWLREFYRAINQNDLEALRELVHDDWTMHWDGRTFTTKDEVKDWFRKMLENSDITVHFEVHVEYKRDGRVTVTVHAHITHKETGTTTQVDEEHHFQFKDGTVKLLETHARTQPT

SEQ ID NO: 96 - protein, 125 aa, synthetic construct
SSEEEIREAVKEIIRRFAEALNNNDMDTLRELYAPDATMHIDGQTFTTLDEIVDWFRKFLESFDITIEFEVEIRITKDGSVTVHVHFTVHFNDTGTTTKFTSTFHIQQVNGTFKIKEEHLTTQPT

SEQ ID NO: 97 - protein, 121 aa, synthetic construct
PDERKIKDWIRRYLEALDRKDLDELKELFTKDWTFHLTGGVTFTNIEQFIEWVERWLSSFPRSRHQVDSIEIHGDTVTVHVTVTLTHPDGKTVHATYTEHHRFAPDGKITETRVHIDQKDT

SEQ ID NO: 98 - protein, 120 aa, synthetic construct
PDAEEIKEWVERWFEEVFNTGDADRAKELLTPDWQYHLYAEQRTFHTLEEFREWFTEFIKTFQEIHVEWKSVEVRGDTVTFHIEMHTTHNGKKVTFTITEHHRFKDGKLVETHVRIHQRN

SEQ ID NO: 99 - protein, 122 aa, synthetic construct
PDEEIVRWVREMFERAWNTGDADQAASYYWPDWRVVHNGNKENRDLEEYKEFWERMLRSASDVKFQFDSIEVHGNTVTVHVTVTFHHKDGETVHVHVTETHHFDKDGRLVETRQHSDQRDQK

SEQ ID NO: 100 - protein, 122 aa, synthetic construct
PDERLIEFYLRYFDYVFNTNDADAMKSAYHPDARFTFDGNTSQISLDEFKEWFKKWVESVKRFHVKWDRVEADGNRVTFHVTIHFHHDSGKTTTVHITFHVVFDKDGQIVEERIHRDTHEHE

SEQ ID NO: 101 - protein, 124 aa, synthetic construct
MDQSEAEEMIRQFYKRFAELLNRGDIDVLAQLFTPDATFHISNGQTFNSKDEFAEWLEELFRQNWQFEFHLEFKEFNGDHVTVEVHVTMRHSNGKTVHVTATHHWRFGDGELKLVEVRMHFNET

SEQ ID NO: 102 - protein, 118 aa, synthetic construct
LSEEEIKEILKRFYEALDKGDADKLRELLAPDWRYHNAAENRTWDDKEEWIEEYIKSLRRHAEWQRQIESIEIRGDTVTVHYTVHWHHGDQTRTIRVTDTHHFRGKRIQETQAHWNQT

SEQ ID NO: 103 - protein, 124 aa, synthetic construct
MSEEEVKEIARQIIKRWFEAVDKGDVDALMELYDKDRARMHINGQTFTTMEEIKRWFEKWASQNIKHDFEVHSQIEGSNVVTTHVTVHVTFSDGSTMQIHTTFFMEYSDSSWKILEQRTNNQNE

SEQ ID NO: 104 - protein, 124 aa, synthetic construct
MSEKEVKEQIKEFKRRLVEAFNNGDLDAIAELVDKDESTFHFDGQTYTTLEEFLKWVKELLDQNVRLEVEIHIEIEGSNQVHVEVHITFHFSDGRTVHVTSHDRYDLSDSKLKLREMRVHNQGE

SEQ ID NO: 105 - protein, 124 aa, synthetic construct
NSEEEIQRKIEEWLRQFYEAFNKGDADHMARLVDKDMSTMHSNGQTFTDIEEIKEWLKQLFDQGIRIEFEIHIQINGSSEATVTVHVRFHHPDGSTINVTEHHRFRADDSSLRLVETHQNWQNE

SEQ ID NO: 106 - protein, 124 aa, synthetic construct
PSEKEIREMVKEWIRQWAEAFNKGDWERLAELYDDTNVEMHISGQTYTTLEEIIKWIQEFLSRDVQVHIEIHIQIHGSNTVTVHVHFTFHFKDGTTVHSTSTFHFDASDSSLKLTSQHVTNQTE

SEQ ID NO: 107 - protein, 120 aa, synthetic construct
ASEEEIRETLKRFFEAINKKDVDKIASLFHPDATVHFYQGITVTTKDELKEFLEKWFKRLRDVKVQVESIHIDPTGHTVTVHWTMHVNKDDTTITFHATTHFHMKDGKIVEMRIHVEQRD

SEQ ID NO: 108 - protein, 120 aa, synthetic construct
TSEEEIRRFLRRYYDAFNKKDVDKLEELLHPDWQYHNNTGQTLTNMEEFREWVKELLSRLKDVKIQIEEIHIDSNGHTVTVHVTVHVNNGDRTVTIHTTDHHHFKDGRLVETRVHAQQTS

SEQ ID NO: 109 - protein, 123 aa, synthetic construct
PEWEEVVRELKRRLIEAMNSRDWSKLAKLIEEIFHDDATLQVNNQPFTTKEEIKEWFRRVASNDIDIEVDTEVQPKDGKYVTVHTTYHMTDKSTGTTTTFHATDHYQLEGNKIVRTTMHSRST

SEQ ID NO: 110 - protein, 121 aa, synthetic construct
PSKEEIKDWVTKWYQALNHKDLDKVVELFHPDATIHTSTLNITWTTKDEFRKFVESWLRQFPDHRIQIDEIRIDDTSATATVHVTVHLTQNGETYTIKYTEHHTFDSTGQVVETHQTIDPK

SEQ ID NO: 111 - protein, 121 aa, synthetic construct
PSKEEIKETVKRWFEAFDKHDLDALVELYHDDATITDYSNNTTFTTKEEYRRHVESFLRTFPRMQHDIHEIRIDETNYTVTVHVTTHLTRNGKTKTVDVTFHFTLDHDGKIKEQHTRFNDR

SEQ ID NO: 112 - protein, 120 aa, synthetic construct
DWEEEIREIIQRFFEAIDNNDRDTIRELLHPDARMEVSEGYTMTNLDEIVKWVEDFFKNWHRMRHEIEEIEFNGKTVTVHWTAHFTHKSGQNYTIHGTTHIHFHDNGKIARLEFHLDQRD

SEQ ID NO: 113 - protein, 121 aa, synthetic construct
TSEEDERAIKEWVRRFYEALNTDPDAVKEFYSDDAQFHAPDGTQFDTKDEIAEWLRQVASNTDITLHSIEVRTDEDGTIHVTVHVQVTNRTNNQSFTVTQHMTFKSDTYQIKRDELRVDDN

SEQ ID NO: 114 - protein, 124 aa, synthetic construct
ASEEDKKRIEELIRRFYEALDKGDWKAIRDLFHDDARYHDSSKGRTFDKEELLRMVKEHSKHSSQHHIKSIEIEKRGDTIHVTVHVEVHNNSTGTTFSVTEHHTFVRHGDDWRIVETRQHIQPT

SEQ ID NO: 115 - protein, 124 aa, synthetic construct
PSKKDEEDIRDMIRKYVEALNNNDLDAVREFYDPDATVHFNSEQRTLSWEDVIRWYEEMLKFRFRIEIKDLHIEQRGDTYTVHVHMQVHFEDTGTTVKVTATFHFEKRGDEWKLVEVHFTFQPE

SEQ ID NO: 116 - protein, 124 aa, synthetic construct
PSEKEEEDIRQLIKHYADAINNKDVEAIASFYTDDATVRFASEQRDFDAEEVKRWYEEMLKNDHRIQIKSIEIRKSGDTVTVTVHMDVTYSSTGRTVKVTATFHFELRGDRWYLVSVHFHFQPT

SEQ ID NO: 117 - protein, 124 aa, synthetic construct
ASKKDQEDIKEWLRRFYEAFNRNDLDAIMELVTDDATFRFSRHQKDFDKEEFREWVERFLSQDSRIQIKSIEIRQDGDEYTVHVEVEIHNSSTGQTFRVTHTWRFRKEGDRWKLIEVHFHWQPL

SEQ ID NO: 118 - protein, 124 aa, synthetic construct
PSEKQQQDIEELLRRFYEAFDKGDLDALRELFHDDVTFHFHSEQRTYDKEEFLEWVERRTRFSTKHQIDSIEFRLHGDEVTVTVHVTTHDETTGTTFRSTHHWRVRQHGDEWRILEVHFTLQPT

SEQ ID NO: 119 - protein, 123 aa, synthetic construct
PSDEEQIRDWFRRWIEAFNKHDMDTLRELYDPNATFHDSRTGQTYDYEEYIKMVKTTLDRFPDVRMELKSMEIEKRGDEITVHLHFQFHYKKTQTTQHVTQTFHFRREGDRWKLKEQRSREDG

SEQ ID NO: 120 - protein, 123 aa, synthetic construct
PSDEEAIREIIRQLIEAFDKKDLDALMSYYDEDATFEDASTGQRYNYEQIRELIERWLRRFPNTAHQLDSLEIRKHGDTVTVHVHVTVTYKDTKETHTFTRTVHFVRKGDRFFITRDRTQSDN

SEQ ID NO: 121 - protein, 123 aa, synthetic construct
PSDQEQVRDIIRRFYEAFDNNDLEKIKELLHPDATFQDSSTGQEYNWEQYVKRVKELLERFPNTAHHIDEMHIEVRGNEATVHAHVRVTYAETQTTTTADHTWFLRRHGDRWFVIRVTTTTRN

SEQ ID NO: 122 - protein, 121 aa, synthetic construct
PMSEEQIRELLKRYYEAMNKGDVDTIAELFHDDARFHHSNGQTFDKEEYRKWVEEYLKKFDMRIQVKSIHIEIHGDTVRVTVHVEFHNPKTGRTFSITHHWHFDASTNKIKRVREQRDDQE

SEQ ID NO: 123 - protein, 121 aa, synthetic construct
PASEEQIRDLVRRYVEAMNTKDVDKLVEFYHDDARYIHSNGQEYDKEEIKEWYERFQKRYDAELRIKEIRIQVRGDTVTVQVHVEVHFPKTGRTVTVTAHFFVDARHNKIVRVREQRDDQE

SEQ ID NO: 124 - protein, 121 aa, synthetic construct
PLSEEQIRELVKAYYEAWNKRDLDALAELLAPDATFEHSNGQQYDYEEFREWVEEFMKKFDAQLRVKEIRIEIRGDTVTVTVHVEVHFSKTGQTYTVTHHWFIDARHNKFKRVQEHTDTQY

SEQ ID NO: 125 - protein, 123 aa, synthetic construct
PDDKEAAEEFVRRYYEALDNGDLDAIKELFHPDAKFHSSSNQTYDREDFIEMIRQWMSQAKDSKHDIDSIHFDKQPDHITVTVHVTVHNSTEGQTYHFTHHWFFRLTDGSWQLVELREQTDGG

SEQ ID NO: 126 - protein, 123 aa, synthetic construct
PSDEEAIREVDTQRLEAIDRGDLERLKELVHPDARFHTANHSTYDRDEWLELVKQFVERFPDSKHEITGMEIEIKPNEVTVHARVTVHVDQTGQTFHVQYTIHYRKTDGGWKIVEVHVQHDGG

SEQ ID NO: 127 - protein, 123 aa, synthetic construct
MNDEQAIKEFKQRYVEALNNGDLDAIRSLFHPDVTFTSADNQTYDWEDFARMIEEWIKTFPDAQIQILSMEIEKTDSEIRVTVHIQVHYPTTGTTHHFTQHDRYRRTDGDWKLVESREQTDNG

SEQ ID NO: 128 - protein, 123 aa, synthetic construct
PVSQEQVKELLQRMYEAFNNGDMDKLRELFHPDAQFTDSNGQTYNAEEMLEIIEEILRQFPDTQIEVKSIHIQVHGDEVTVTIHYTIRRNGQQFDATDHIRFRRTGDKVQIIEMRSDNSEVKK

SEQ ID NO: 129 - protein, 123 aa, synthetic construct
PLSEEQIRQWLRRWFEAWNHGDRDAFRELYHPDSTYEDSDGQEYNRDEYLEMVERTLKRFPDARFEIKEIRIQQDGDTYTVTVHFQVTLNGQTYTVTQHFHFRADGSKLQLARQQSDHSNDSN

SEQ ID NO: 130 - protein, 123 aa, synthetic construct
PMSQEQVKELIKRLFEAFNKRDLEKLERIYHDDATFRDQNGQEYDKEEFKDMVEKFMKTFPDFQLHIDSVEIRIHGDTATVHVHVTAHLRGQEFRVTSTIHLDAQDSEIKIISETVNRNEVKK

SEQ ID NO: 131 - protein, 123 aa, synthetic construct
PVSKEQIKETDKRRFKSFDDGDIEALKELFHPDARYTDQHGQDYDKEEFIRWFKEWKERFPNTAHEIDEMHIQQDGDDYTVHAHVTVHINGQTYHVTYTVIYRYDGDELKIVRVQTHTDDTKS

SEQ ID NO: 132 - protein, 124 aa, synthetic construct
PEEEEQEEAVRDLIRRYAEAFNRGDAETAARLFDEDWTYYDPSGQTYTTREEFKEWVKTLFSRNLRMEVEVHIQINPDGTVTAEVHFTFHHQSGQTYHVTETHHIRQENGTFKITRTEAHLQPS

SEQ ID NO: 133 - protein, 122 aa, synthetic construct
PISEEQIKEFLKEYYTAIDNNDVDKIASLYHPDATIHFPNGQTLTNPEEIREWYERWLSQFPGTAHHIESIHIDKTSNTVTVHVTTHFNHNGEKVTVHYTATYHFKDGKLVSYQDNSGDTTG

SEQ ID NO: 134 - protein, 117 aa, synthetic construct
PDEERIKEILERFFEALQNNDLEKLKELVHDDATFHFDSEKITFTTKEEFIRWVKEFWEKFDMKVEIKSIEIRGDTVHVTWEAHLTKDGQTYTFEGHTTFTFKDGKIVEVRFHVRRT

SEQ ID NO: 135 - protein, 117 aa, synthetic construct
DQEEEIRRIIKREVEAFQKKDIDTWLSLFHDDARVHYTRHGETYTTKEELREFVERVLRHFDVSVEIKEIRISGQTVTVHVTVHETHNGQKYTFNVTVHDRIKDGKITERRVHWNPT

SEQ ID NO: 136 - protein, 122 aa, synthetic construct
ASKEEIKEWLERFYEAFNRGDMDALKRIVDPGVTMHVSNGITFHDPEEIKEHFARMFESSKNTRLQIDSIEFQENGDTVTVHVTAHETKPDGKNVTAHITHHWRFKDGKLVEVHEHVDEQPT

SEQ ID NO: 137 - protein, 117 aa, synthetic construct
MSREEIKDFKRRMVEAFNHKDLDALASLVHDDAQFHSSKGETIHDKEEFKEWVKKTLSVPMRVEIKSIHIDDKDATVTVHLEIHRTHGDKKVTTTATAHDRYTDGRLTETQYNFDDS

SEQ ID NO: 138 - protein, 117 aa, synthetic construct
PSKEEAEEIARRFYEALNKGDWETIHELFHDDAQMHLPNGQTFHTKDEITEWVKRLISVPMRIHIEKIDFNDSEATVTFHVTMTFTHGDEERHIRATHHWRFTDGKVTELREHIDNS

SEQ ID NO: 139 - protein, 120 aa, synthetic construct
PEEEEIKEVIKRFFEAIDKRDADKLRELIHPDARMQLNGEQLTNLEEIVKVYFERFVKNFQQAHHEIKSIHIDSNGTVTVHWQLHVTRNGKDVTINATTHIRFRNGKITEMRFHVDNQEN

SEQ ID NO: 140 - protein, 120 aa, synthetic construct
PLEEEIKELIRRLFEALNKNDWEKYKRLFHPDATQHFNGITLTNLEEIVEWTYKWWVSQYDEWHFEIKSIHIDHDGTVTVHWTVHVTRNGKSITIHATTHIRVRNGKITESENHLDNQEN

SEQ ID NO: 141 - protein, 117 aa, synthetic construct
PSEEQLKELKKEFIDAFNKGDADKLKSLLTPGSTWETNGNETITTLDEFKEWVERVFSNNTQIEIKEIHIDGDHVTVHVTIHTHHPTRTKTQQATQHDTYDKDNRITNTRENTDPKD

SEQ ID NO: 142 - protein, 118 aa, synthetic construct
SSEEEVKEIKRRLIEAFNNKDVDALRELFHPDSTFHSDGRQYDNKEEFVDKFFEELVRRYPRAHFQLDHIHIDGNTVTFHMTVQFHQGDQTYHYRITVHDEYRNGRLANTQIHTDNHG

SEQ ID NO: 143 - protein, 118 aa, synthetic construct
TSEEEIKELVRRFFEALDNRDRDTLKELYSDDAQFHVNGETYHDADEWLKRWFEEFVKKFPSTAHEIKEIRIHGDTVTVHFTVHVTQGDQDYTFHATSHFEFKDGKIKSEQEHMDQTD

SEQ ID NO: 144 - protein, 118 aa, synthetic construct
MSEEQIRDIVKKFFDAVDKGDLETLKRLLHPDATFHLNGRQFDTLDEFLKKYIEEFQRRFPETHRQIDRIEIDGNTVTVHWTMHVTQGDKHITFHGTTHIHFKDGKITRVQIHIDNTD

SEQ ID NO: 145 - protein, 121 aa, synthetic construct
TDPRIKEWVERFKTALFEAFNKKDADKFVSIFHPDIQFSDSDGSTIHTLEELKEWFEKFISQFDRIQVDDQEIRVDGDTVTVTTHVTFHRGHKTVTITYHDHYEFRDGRLVNVHTQTDPTK

SEQ ID NO: 146 - protein, 121 aa, synthetic construct
TDPSIKEIIREFYTRLLEAFNKGDWETVVSIFHPDHTFHFEDGSSITTLDEWREWVERFMSQADRIKVDSLEVRQDGDTVTVHVTVTITHGDETYTFHATYHHVIKDGRFVETHQHNQPEQ

SEQ ID NO: 147 - protein, 121 aa, synthetic construct
TDPRLRKWLEDFYREFAKALNNKDADLAASVLHPDVTIHLENGETLTTLDEFKEWFTKMASTMDRVQFDEIRIHQHGDTVTVHVTVTITHGDETYTFHATHHWVFKDGRLVEVHISTQPQR

SEQ ID NO: 148 - protein, 121 aa, synthetic construct
TDESIKEFIKRFYEAVFDAFNKKDWKKFVDLFHPDVTLYDTDGRRYTTRDELREFFERLASRFDRIQLDSIEIRQDGDTVTVHIHVTFHHGHKTVHQTITHHWRFDDGRVTEIRQNSDPKD

SEQ ID NO: 149 - protein, 131 aa, synthetic construct
ASKEQQEQIKDWLRRYFEALNKGDWETLKELFDDDWTVTDASTNTTYDAEEWLRMYRTLLSQGFEFRIEVKSVEIRLNPDGTVTVTVHFTMHVTHNGRTVTLHVTEHHHIRFKDGSLQVVHTQVHTDERHP

SEQ ID NO: 150 - protein, 131 aa, synthetic construct
PSKEDQEAIEEFLRRFYEALQKKDLDALEELLTPDWRYYDARTNRTYDLEEFKEMVERRIQNGFDVKVEIKSIEFQKNPDGSYTVHVHLQFHFTHNGKTVTVHTTDTHRFEKHDGRWRLIETRFHYDNRHP

SEQ ID NO: 151 - protein, 131 aa, synthetic construct
PSEEDKKKIEEFVRRFYDALNKNDLDKLKEVLDDDWTYYDARTNERFDLEEYLRRLEELIRQGWETHIEIKSIEIRKNPDGSYTVTAHVTLHFTHNGKHITVHATDHHHIQKKDGTLKFKETRAHYDSKHP

SEQ ID NO: 152 - protein, 126 aa, synthetic construct
ADPSQQEAIKQIIERYYKALNEGDVDTMVDEIYHPDGRFTYSGADVEQFKEWVKKWLSTFNVKIDITSLEIQGKDNGQVTVTVHVRFQVHQGDKTYTFHVTQHFVFEFTKDGVRIQNDQINRENEG

SEQ ID NO: 153 - protein, 124 aa, synthetic construct
DEREELKEAARQIAERFYEAFNRGDLDTLYELMAPGWTFHHQGGETYDRDQFREMVEKWLRQKIHLHIKSIEVEVKDDGTVTVTVHVEARQEDTGRTYPFTDHHTVQFTKDSWRIVETHQHRDN

SEQ ID NO: 154 - protein, 124 aa, synthetic construct
DERKEIEEAIREMIRRYVEAFNRGDADALYELFDDDWRYHHQGGETYDLDQFREMVERIFSQGVRLQLDSLEIEVKDNGTATVTVHLTMTEAQTGRTTHFTEHHHFRQKKDGWRIQRTHQHTSG

SEQ ID NO: 155 - protein, 124 aa, synthetic construct
DERQEIEEKVRELKKRFIEALNSGDADTVASLFHPGAQFHHDGGETYDLEQFKEMVERFFSAKIEIRLDSVEIRVNDDGTATAHFHFTFHETDTQRTFHGTQTDFYRQTKDGLYIVEVRSHRDG

SEQ ID NO: 156 - protein, 130 aa, synthetic construct
HDEEAEEKIRQWLTEYYRAIDNGDWEKIAKLVTDDSKFTHRDNGRNETYDKEDLEERIKELANYESQHNLKEIRVQINPGGSSVTVTVHVEVHFHHDTGTTTFHATHHWHFRFENGELKLVEVRVQIDNS

SEQ ID NO: 157 - protein, 127 aa, synthetic construct
MSEEEVRQAVREFKKRFFEAIDKGDLEKLKSLIHDDARFHHARGQTYNKEEFIEMVEKWHRQDTAHQIDSIEIQFHDDGSVTVTVHVTVHVNHKDKTVTVHVTYHDHYRYGSPGWKIIRMQVHRDHT

SEQ ID NO: 158 - protein, 127 aa, synthetic construct
TSTEEAKEDIRQFVEEEFKAFNNGDLDKWAELVHPDATFHTDEGTTYDVDQMLEMIEKAVKNNTHVTIDSIEIRQHDNGEFTVHVHITVHTNRDGSTQTVHVTQTDRFDQSSPGWKLIERHTQRDNT

SEQ ID NO: 159 - protein, 127 aa, synthetic construct
ASKEDQEAIKELLKRFFEAMDKGDLEALKRLVDEDWRYYDASRNQRFDADEFLEMVERQARQDTKRELKSIEIQPTDEGHITATVHVQVHVTRNGETRTYTVTEHHVFVKKNGSWKIVETQVHTDSN

SEQ ID NO: 160 - protein, 127 aa, synthetic construct
ASPEQQEQIRQLVKRFFDSMDKGDRDAIREFYDDDATYRDARRNQEYDKEQIVEMIERIFRNDTRHEIKEIRIQPTDEGQITVTVHVEVHQTHNGKQVTFTVTSHFRFEFRNGEVYLVSEEVHTDDN

SEQ ID NO: 161 - protein, 127 aa, synthetic construct
ASEEQQEKIKQWKRRFFEAINNGDLDALRELVHPDAQFTDASTQQTFDVEEYLKRIEELLKQDFQIEIKSIEIRPTDEGRVTATIHVQVHENHNGRTKTVDVTQHDLYQFENGSVKLVSTQTHRDET

SEQ ID NO: 162 - protein, 127 aa, synthetic construct
ASEELRQAAEDWVRRYAEAWNKGDVDALASLYHDDARYTDDSTQRTWDKEEFRERFERLMSQDMRMEIKRIEFHPTDEGEITVTVHVTIHANHNGRTHTVDVTRHFRFRQQDGEVYLVSDQSTRDSK

SEQ ID NO: 163 - protein, 127 aa, synthetic construct
ADKEQQEAIKDFKRQYVEAYNKGDMDAIKSLFHPDAQFHDASRNQTYDLDEFIERLERILRQDSRMEIKSIRIEPTDEGEVTATVHVTVTHNHNGKQHHITYTQHDRYVFQDGSVYIVETQIHTDSN

SEQ ID NO: 164 - protein, 127 aa, synthetic construct
TSKEQREKLEEVIRRFYEAFNRGDLDALKRIVDPDATFHDDSKQQTFDLEEFIKRVEEILSSDVKIEIKSIEFHPTDEGEITVTVHVQVHQNKDGRTQTFTVTNHDVFREENGSFKIVEHQSRTDDN

SEQ ID NO: 165 - protein, 125 aa, synthetic construct
DSPDQQQIKEIIKRFAEAFDKGDADTVLELVAPDWRYTDARSNTTYDAEEFAEMVKRLASQDLQRQIHSLEIEFRGDTATVHVHVTVHHNKGDRTQTVSVTETHHLQKRNGQWYLVRTEVTHHQT

SEQ ID NO: 166 - protein, 125 aa, synthetic construct
DSEDQQAIKELMKRLYDAINKGDMKALKDLLHPDVQFTDSRSNTTYDLEEYIDMVKKMLSRDVQVHIESIEVRIHGDEVTVTVHVTFHEHHGDKTHTVRVTHHWRIRKKDGQFYVIEVRVTHNPS

SEQ ID NO: 167 - protein, 125 aa, synthetic construct
DSEDQQQIKRLKKELIEAFNRGDMDRFKELIHPDAQFHHYYSNTTYDVDEFIEMLEKMLSTDVRVQLDEIHIQQDGDEYRVEVHVTVTWHKDDKTQHVHFTATDRYRKINGQWYIVEHRVRRHQS

SEQ ID NO: 168 - protein, 125 aa, synthetic construct
PEEEELQEAIKEIIHRFYEALNKGDLDAVMSYYDDDARMHHASGQTYSKEEIRRWFEELLKQGVQFEIKEIRIQVDKDGEVTVTVHVTLHHTGTGKTVDVTQHFRFRRENGSFKLLEDQVHEHDK

SEQ ID NO: 169 - protein, 125 aa, synthetic construct
PEEEELEEKARRAVKRFFDALNNGDIDAVLSLFDDDWTYHHSSGQTYSKEQFKEMVERFQSQGFEWHIESLEAEVKKDGTVTVHVHVTARQRGTGQEFKITETHHFRFENGSVKIVETHVHTHDT

SEQ ID NO: 170 - protein, 125 aa, synthetic construct
PQEKELEEQVRDVKRRMFEAFNKGDWQTLSELIHDDATFHHASGQTYDKEQFIRMMEEMFKQGWQLHVDSLRIEIKKDGEVTVEVHVTAHQPGTGRTTHFTSHDRYQQKDGSVKLTETHTHEHST

SEQ ID NO: 171 - protein, 130 aa, synthetic construct
PKEKEDRDEIKEIKQRLAEALDKGDWKTFRELFHPDAQFHDDRTGQTYDLDEMLEMIQRQASIPARREIKEIRIQFIDNGTATVQVHVQLHQTRGDVDYTTDVTTHDHYTAKSDEWKITETKITVDDKDG

SEQ ID NO: 172 - protein, 130 aa, synthetic construct
PWKKEAEEQARELVRRLYEALDKGDIDAIREMLHPDFTYHNPSTGQTYDKEQFLEMVERLASIPMQRDIESIRVEIKDDGTVTVEVHVTIHETHGDQDYTVHVTDHYHFRSDSDELKLVELHSTTDTKHD

SEQ ID NO: 173 - protein, 130 aa, synthetic construct
PEEEELKEQVKEWLEREVEALNKKDLDTWVSLFHDDFRYHDPRTGRTYDKEEMRRMVEEFLKFDFRIEIKEIRFEFLPDGTIRVTVHVQVHVTRGDQDYTVHITYHLQFRRDSDELKITSKQSHSDTKDD

SEQ ID NO: 174 - protein, 130 aa, synthetic construct
PWEEEMKEQIEKIVRRLVEAWNKRDIDKIVSLYHDDWQYHNEKTGQTYDKEQFKKMVEELLQIPFHIQITSIEFRTHKDGEITVTVHVQVHRHHGDKTYTIDYTEHHRFRAESKEVKIQETHVRTDEKRE

SEQ ID NO: 175 - protein, 125 aa, synthetic construct
PAGEEDVRTWLKRFYDALNNKDADKVASLYADGAQITFSESNRTLDKEEFKRWVEQMASTDAQFEIKSIEIRFGDDGSVTVTVHVQVHENHGDQTKTVDVTQHFHMRYTDGQWKVTRDEIRFHED

SEQ ID NO: 176 - protein, 125 aa, synthetic construct
AVGEEKIKEVKRRLAEAFNKKDVDALLRLFHPGAQFHFAESQTTYDQEEFKEWFERYASTDVEMRIDSVEIRVNPDGTVTVTVHMTLHMTHGDQTQTFHVTAHDEYRETQDDLKVAETRFHMHQD

SEQ ID NO: 177 - protein, 125 aa, synthetic construct
SGGEEEIRRLVKRFADAFNNKDLDAILSLFTDDWRITDARRNQTYNLEQFKEMFERIASQDVQVQIDSIEVRHNDDGTITVTVHLTYHERRGDKNDTFHVTEHHHFQLTQDGMKLVETRVHHRGE

SEQ ID NO: 178 - protein, 129 aa, synthetic construct
TSEEEQKEQIKELIERLVEAFNKGDRDKFESIYDDDATIRDASDPTDFTKEQFLELVKQFHSQNFHLQITSIEIRINPDGTVTVHVHVQVHLHQGDETKTFNVTSTFFFTQENGSWKIKEERIQFNTHE

SEQ ID NO: 179 - protein, 125 aa, synthetic construct
DSEEEVREKIKETVKRLFEAIDKGDLDKVRELIHPDATFHHDSGETYSLEEFLEMVEKLARNNSRHHIESLEIRQVDDTTFRVTVHWTLTDDRTGSTLRVTTHIQVRFENGELKITRVEERTDPT

SEQ ID NO: 180 - protein, 125 aa, synthetic construct
DSEEEAREKIKDFKRRLVEAFNKGDIDALRELFHPDVTFHTSDGQQYDLEEFLQMMEELFRQGVQMHVRSMEIRQVDDTTFTATVHVTLHNESTGTTVDVTFHDHYRFQDGELYLIRSEARTDSK

SEQ ID NO: 181 - protein, 125 aa, synthetic construct
DSEEEIREKIKELIKRLVEAINRGDADAVASLFDDDWRFHQDQGTTYDREEFKKWVEELNKANVHIEIKSIEIRIVDHNEVTVTVHLQFHNDTTGTTVRVTEHHRFVRKNGQWRVVETRMHTDPL

SEQ ID NO: 182 - protein, 125 aa, synthetic construct
DSEKEQEEKIREFIKRFYEAIDKGDLDELRELLHDDWRYHHARGQTYDKEEFLKMVEEMHSNDLKHQIDSLEIRVDSENTVTVHVHVTVHNSSTGKTFRFDDTHHFRFQDGELYLTRTETHTDNS

SEQ ID NO: 183 - protein, 125 aa, synthetic construct
DSEEEMKEKVKEVIERFYEAINKGDLDALRSYMTPDWRYYHWSGQTYDRDEFLKMVKEMNDAGVRVQIDDMEIRIDDHNQVTVTVHLTLHNQSTGTTVKTTDHHTFRFQNGQVYIVSTHVQEDHR

SEQ ID NO: 184 - protein, 131 aa, synthetic construct
PGQQEDQRAIKEWKERYIEALNKKDWKAVADLVSPDAKFTNNSEQQTFDREEYIKRVREYLEKFDTRFEVKEIRIEIKPGNETFTVHVHVQVHVTHGDETRTFDVTQTDHYTKKNSQWYIVETRWTTREVK

SEQ ID NO: 185 - protein, 131 aa, synthetic construct
PGEEEARRQAEEIARRFYEALNNKDWEAIARLVDDNAKFTLTATQRTYDRDEMIEMIRRMLEQFDIRVEIKSIEFHIDPGGDSITVTVHGTITFNRGDKQKHVDVTHHWHFKQGDSQLKLTHLQETRRDLE

SEQ ID NO: 186 - protein, 131 aa, synthetic construct
PGDEESEKEIREFIEREFEAFNKKDWEKWARLVSDDAQFHMASEQRTYDAEEMKEWVRRTLEQFDIKIEVKSIEIRFHPGGDHVTVHVHFTVHETHGDETRTFHVTVTLHFERRNDQWYLVSKHIHIQPQE

SEQ ID NO: 187 - protein, 127 aa, synthetic construct
MSEKEAEEAIRDTIRRWVEAINKGDADTAKELYTPDATIVHDGQQFDRSLDEIKEFIKKLFDNNVKLHVRSIEIHVDPNGGDVTVEVHVQLTDDRTGKTVDVTFHAHLTINGDEVRIKRQHEHRSDT

SEQ ID NO: 188 - protein, 127 aa, synthetic construct
PSEKELEEAAREVVKAFYEALNRGDADRLAELLAPDVTFVHSGNQFDLSLEEFKKWVEEFTKAGFTLHVHDMEVEIHESGGTVTVHVNFQLTDHRTGTTYTVRDTYFLQFHGDEVKIKRVESQTDQQ

SEQ ID NO: 189 - protein, 127 aa, synthetic construct
TSSDEAREAIKEIFRRLAEALNRGDLDTIKELYDDDVTYTNNGETQKRTRDEYKKFAKEFFDNNIKIQIHDMEIHQDPRGGTFRVTVNFTVTNDRTKTTRRFQSHMVLQFHGDEVRIKEEEERTDQL

SEQ ID NO: 190 - protein, 126 aa, synthetic construct
PSKEDEEQLREFDKRRFEAINRGDWEAVERLMHPDATIHVASRQRTYNLEEFIRMMQELFRQNVQLEIKSIEVRQLSKDTFQVHGHLTVTNRTTGTTFHVDYTVFYRKGSGDWKIIEVRFRTDEEK

SEQ ID NO: 191 - protein, 126 aa, synthetic construct
ASKEQQEQIREWLKRFYRAFNQGDADALMELLHPDWTYTNESEQRTYSKEEFREMVKKLFDAGVQIKVDSIEIQPDSKDEITVTVHVTVTQKTTGRTWHVTEHHHFRHGSGDMKLIRTRFRMHQQN

SEQ ID NO: 192 - protein, 128 aa, synthetic construct
PPPEDEEAVRQVIRRYYEAWNNKDADKIMSLYHPDARFTDESKGQTYSYEDYKEMVERILRNSDMRIEIKSLEVRKVSDGRITATVHVQFHHTHGDEHHTVRVTQHFFFQKKDGEFYIVEDRVRIDNN

SEQ ID NO: 193 - protein, 128 aa, synthetic construct
PPPEDQEQVEETDRRRIEAFNHGDVEAIASLFHPDATYEDSRTGQQFDREEFKEMVERFFKSVDFRIEIKSLEVQLYDEGHIEVTVHVQVHVRHGDEHYTMHVTYTVRYRKVNGTWKIVEMRTTSNDS

SEQ ID NO: 194 - protein, 123 aa, synthetic construct
DEREESKEAIKEWKRQYVEAWNKGDLDALRELFHPDVTWDGHPYDYEQWVERVERFLRQFDTQLHMDSMEIRIDSDNTTVEVRVTITVHNHRGDRTETYTFHYTDVYDSRHNQLVKSTTHTDT

SEQ ID NO: 195 - protein, 123 aa, synthetic construct
PHEEEIKEIVKEIVRRWVEAYQNRDMDTLRELYAPDVEFEGLPVDYEEYLEWVERVLKRADVRVEIKSIEIRIDHDNTTVTVEVHVEVHERHGDQDHTYRATYEFVIDRRHNKIKRQREQRDT

SEQ ID NO: 196 - protein, 123 aa, synthetic construct
DEREEIERKIREFKRRYLEAWDNGDLDKLDELLHPDATWDGNDIDWEQWKEIVRSLLENSDTAHHLKEIHIEINDDNTTVTVTAHVETHHHHGDRTETYRVTYHDHYDRRHDKLTRSTTRRDE

SEQ ID NO: 197 - protein, 128 aa, synthetic construct
PKAQEDIRQLVKRYFEAMNHGDMDALRSMIHPDATFHFADEQKTFDREEYLERWKQSFDNVDFRIEIKSIRVEQNDNGTYTVTAHWTVTFHHDHRTHTYDGSTTFFVVKDHNGEWKFVEVRENMNQNQ

SEQ ID NO: 198 - protein, 128 aa, synthetic construct
PEAEEKIREWIKRFYEAFNKRDMEKLKKMIHPDATFHFEDEGRTYDAEEFLEMIEQFLKKFDARIQVDEIEIRIDEDGTITVTVHVTLEVTDSSQTYTHRATHHWFFRQDHDGSIKLVEVRINTDQEQ

SEQ ID NO: 199 - protein, 128 aa, synthetic construct
PKDEEDIRDIDRKRLEAIDKGDLDKLRSLFHPDATFHFADYGRTYDKEQFLRYMEELTKKVDMRREIKEVHVEKKPSGEITVTVHVTVQFHHPDRTIHRDITYTVFYRKDHNGEWKIIRFHINETQKN

SEQ ID NO: 200 - protein, 128 aa, synthetic construct
PKWQEDVERLVRRFFEALNKNDMDALDELFAPDAQFTFEDTQQTYDKEEFKEMIEKMLSNVDMRIEIKSIEVRLNDDGTVTVTVHWTATRHHDNSTFTHHGTTTFFFQPDHDGSWKIKELRINSTNEN

SEQ ID NO: 201 - protein, 128 aa, synthetic construct
MSDEELKEAVEEFDRRRFEAFNRGDLDKLRELYHPDATFHFASEGQTYNLDQFIEMVRELMSRDVKIQIKRIEIQIDSRKDYITVTATFEMHEHRDSRNKTVQYHYTVVYRKGSFKIIEVRVQSDEDS

SEQ ID NO: 202 - protein, 128 aa, synthetic construct
MSEEELKEVIRQLVRRFYEAMNKGDLDTLKELFHPDAQFHHAARQQTYDLEEFLEWVKEMFERNVRIQVHQIDVQINPNKDTITVTVHVTFHNHETSSNKTVRVRDHYTFQRGHFKILRVQSHVDDDS

SEQ ID NO: 203 - protein, 131 aa, synthetic construct
PDPSEIQEQVKDFIRRYVEALNKNDLEELRRLFHDDWTYHDTRTGQDYDRDQFLEMVKRRIDAGNRAEFHVDRIEIDMNDGDDVTVTVHMTVTFHHGDQTRDYRVTEHHTFRRGTNSLKIVRTQTTTHNTQ

SEQ ID NO: 204 - protein, 131 aa, synthetic construct
SDKSEAREIVKDWFRKFYEALDRGDMDAVRELLHPDVTFHNDSTGQTYNKEDFIRRWEEMLRQGNDAQRQLDSVEFDDNETDEITVTFHVTVHWHHNDHTQTVKITNHDRFRRGTNQFYIIEHRSRRNNTR

SEQ ID NO: 205 - protein, 131 aa, synthetic construct
MDTSEAQEAIKEWKRQYIEAWNKNDLETLKKLIHPDVTFHDSSQGQTYSADDFLERFERMVRAGVRVQVQLDSMEIDQNHSDTYKVTVHLTVHQHHGDKTTTFSVTQHDRYDQSTNDFKVKEVHIHTDQTE

SEQ ID NO: 206 - protein, 131 aa, synthetic construct
MDESEAKEAIKEWLRRYYEAWNKGDADALRELLHPDVTFHDSSTGQTYTLDDFLERFERLLKSGTRFQIEIKEIRIDPQETDDYRVTVHYTMTVHHGDQTYTFTATDHFRFRYGTNEFKLVEVHSTVDNTS

SEQ ID NO: 207 - protein, 131 aa, synthetic construct
SDKSERQEEVKEWVKQFYEAWQNNDADALRELIHPDVTFHNDSTGQTYTADDFLRRFEELVKNGARVKVDIHSLEIDDNETDDVTVTVHYTVHRHHGDETQTQRATDHFTFRYGDNGMRLTSVRSTTDDTE

SEQ ID NO: 208 - protein, 128 aa, synthetic construct
PQEKEQEEAVRDLIRRMFEAFNKKDVDAVLSLYAEDATYHDSSTGRTFSYEQFKEMLKRLSQTDTRLEVDSLEIRFHDDGTVTVEVHVTMHTRSNSQPQTVKVTSQFHIRQENGSFKIKEEHVTHDST

SEQ ID NO: 209 - protein, 128 aa, synthetic construct
PEEEEFRKAVEELKRRFVEALNKGDWETIARIFTPDSTMTDSNNQTFNLEEIRERVKQLFSNDTKVEIKSIEIRFDPSGRTVRVTVHITVTTTHNGQKKTFDVTAHDVYVQDGDTLKIVHTQFRRRDT

SEQ ID NO: 210 - protein, 128 aa, synthetic construct
PEEEEMKKAAEEVVRRFYEAFNNGDADALKELVSDDSQFHDSSGQTYNAEEFKEMVEKLLSANVKLEIKSIEFRIHKDGDEITVHVHVQMHQTTNGNTKTFDGTNTDRLRKDGDSFKIVEHRSHWRNT

SEQ ID NO: 211 - protein, 129 aa, synthetic construct
PTDEELEEAARQWVRRWVEAFNHKDLDALRELYHDDFRYTDSRTQRTYDKEQFEEMLKEQMKFDFRIEVKSIEVRIDSRKNHVTVRVNMQVHETHGDQDHTVDATYEFHFRFDGTSVYLIEQRVHYNPQ

SEQ ID NO: 212 - protein, 129 aa, synthetic construct
PSDEEIKKQIEEVVRRYVEALNKRDLDTILSLLHDDWTYRDEKTQRDYSKEQFKKMVEEAAESEFRVEMKSLEIRVDHNKEEVTVQVHLQFHHHHGDRTQTIDVTEHHRLRYDGTSWKIIETRVHIREQ

SEQ ID NO: 213 - protein, 129 aa, synthetic construct
PEEKEMEEQIREALRRFYEAFNNKDMDKIRKLIHPDATFRFEETQRDYDYEQFIKWVEELLSFDTKIEIKSMEVRIHPNGREVTVTVNVQVHVHRGDKTTTQDVQHHWHFRNDGTDWKVISLQIRIRTT

SEQ ID NO: 214 - protein, 129 aa, synthetic construct
PSKEEIRKQIEEIIRREFEALNKGDLDTWLSLFHPDAKYHDASKQRTFDREQLKEMFERLVKSDFRVEVKSLRIEVDDSGTEVHATVHFQVHFNHGDETHTFDVTTHITFVRDGTSWKIKSKQTHRHSQ

SEQ ID NO: 215 - protein, 129 aa, synthetic construct
PEKEEIKKQIKEIIERMFEALNRGDMDTAASYFHDDWQFHNNKEGQTYDKEQWKKMVEELLKNDVRMEIKSIEVRVDDSGREVTVTVHVQMHFNHGDRTQTVDITEHHRFVNDGTDWKIIETHVTINEK

SEQ ID NO: 216 - protein, 129 aa, synthetic construct
PEEEEMEKQVREVIRRLFEALNKGDLDTADSIYHPDATFRFASTQKDYDYEEFKEWVKRLVETSAQLQIHSMEIRIDPSGREVTVHVHFTVHRNHGDTTHTFRVTSTFHLRNDGTGWKIVSEQIQTDST

SEQ ID NO: 217 - protein, 129 aa, synthetic construct
PEEEEMEKAVREVIRRYFEAWNKGDMDKIEELYHPDATVRLERYQRDFDYEEFVEWVRRVLSFSLQIDIHSLEIHIDPSGTEATVTVHYTVHYNHGDRTKTIHVTSHFHLRKDGTSWKITSEQAHFRET

SEQ ID NO: 218 - protein, 127 aa, synthetic construct
PSEEDEKRIKEWKRREVEAFNKGDMDKLEELFDPGVTFVHGNETQDRDKDAFKEFVKQLLSQNIQIEIDSIEIHKSSSDGDLTVTVHVTFHNKSTGYTYHITYHDRYRVDGKEVRLVESQERRDNGR

SEQ ID NO: 219 - protein, 130 aa, synthetic construct
PSKEDQEQIKEIVKQFYEAFNKGDYDKLSRLLDDDHTVHISNGQTITSREEFEKWVREFKSKFNVHIEIKSIEVRQHDDGTFTVTVHVEVHETHNGETRTYKVTTHHEIRKTKDGWQMVRTEVHWNNTGS

SEQ ID NO: 220 - protein, 130 aa, synthetic construct
MSDDEAKEAIKEWVRRYVEALNKNDLDALDELFDEDWEYHNSAEPRTYDKEEFKKMVEELIRNRLEFRIEIKSIEIRRTNGDDYTVHVHVQVHTHTDGQQHTMNVTETHHFRFKDGELKLKETRENINPT

SEQ ID NO: 221 - protein, 130 aa, synthetic construct
TSEEEAQEAIKEMVHRFFEALDKGDWKKLADLFHDDGKFHDSSNPTTYDKEEYIRRVQSRVKANIQSHHEIKSIEIRRTNGDEYTVTVHWTLHEHHDGQTRTRNATTHLRFRFENGQVYLIEMRTTWHST

SEQ ID NO: 222 - protein, 128 aa, synthetic construct
MSEEEQRQQAKEWLERYFEALNKKDADAVASLFDDDWTFYDSTNQQYDKEEFKEMVERMLRHFDAQFDPKEIRFQIHGDNHITVTVHVTVHFHTDGRQHTFHVTEHHHFRFKDGGIKILETRLHRNPS

SEQ ID NO: 223 - protein, 128 aa, synthetic construct
MSEKEMEEEARRVFEQLMRAFNTGDADAALSLYHDDARFHDSDGRTFSKEEFKEWFKRWADENNAQLHIHDLEVQIHGNSEVTVHVNINVTFHTDGRQFHITFRSTFRLEFHNGELYIVEEHLHTHST

SEQ ID NO: 224 - protein, 127 aa, synthetic construct
PSDEQEEQIRQTKKRFIEAFNSGDIDQFKELVHPGATFHFSDTGRTFDKEEFIEMIKKLLSQDTKIEVKSIEIRLKDGTEVTVTVHVTFHTHRGNKTQTFDVTFHDHYRQTKDGWKIIEVHITTNPT

SEQ ID NO: 225 - protein, 127 aa, synthetic construct
PSKEQEEAIREILKKFAEAFNKNDLDKLFSMLHDDWHYHDASTNQTYSREEFREMVERLLSTDVKIEIKEIRIELKDGEEVTVEIHVTYHFHHGNKTKTVDVTEEHHFRFTKDGVRIVETRVTSNER

SEQ ID NO: 226 - protein, 127 aa, synthetic construct
PSEEQEKQIRELVQRFYEAFNNKDMDKMSELVHDGAQFHFSNTNQTYDKEEFLDMLRKLLSQDVQVEIKEIRVQLFDGEEITVTVHVQMHRNPGNQTQTYSATHHWRFRLTKDGWRIIEVHITTNPT

SEQ ID NO: 227 - protein, 127 aa, synthetic construct
PSEEAQEQIKQIKDRFIEALNKKDMDAIDELFHPGAQYYNSDTGTQYDKEEFKDMVKKRLSRDVRLEVKEIRITEHDGDHYTVTVHVEVHFHQGNETQTYKVTFHDRYRKTKDGLYIVSTEVTTRPT

SEQ ID NO: 228 - protein, 128 aa, synthetic construct
ASPEDQSKIEEWKRRYIEAMNRGDLKTVIELFESSPDARVTENGQTYNPEQFKKMVEEFLKKFDFRIEIKSMEIRQDKDGEIHVTVHYTVHVTHNGETQTYHYTSHDRYRKSNGDWKLVRHQTHTQPS

SEQ ID NO: 229 - protein, 128 aa, synthetic construct
TDPEDQRKIKEWKQRYIEAMNHRDLDALRELVQSSPDATFYLNGQQFDIDQYIEWMQRLLENFDIRLQLDSMEIRTDEDGTIHVTVHITVHVTHNGKTDTYTVTQHDRYEKHNGSLKLVSSRAHTQPT

SEQ ID NO: 230 - protein, 122 aa, synthetic construct
MSEEEIKEWVKRWAEAFDKGDVDALASLYDDDAEIHYSDGITITSREEFKEWLKKFMRHADVEHKEIHIHIDKRTGTVRVEFHAHETRRGTGETYDATFSRTFHFDDGRLKRDQAHSDQKKT

SEQ ID NO: 231 - protein, 122 aa, synthetic construct
TSEEEIKEWVQRWLEAFDKGDWKKLVDMLDEDWTYHNSNGRTITTLEQFRRWFEEFKKNADTQHKEYEIRIDSSTGTVTVHYTVEWTQKGTGEKYTTHVTEHHTFTDGKIQETRTHEDTKKT

SEQ ID NO: 232 - protein, 122 aa, synthetic construct
MSEEEIREWLKQYYEAIDNKDRDKLDSLVTPDVTFHYSDGITLTTKDQYREFVTRVLSNMDVRHTEVEIHVDSTSGTVTVHVHVKVTHPGTGETYDATVTDTYHFSDGRLTEVRSHRDTKHT

SEQ ID NO: 233 - protein, 117 aa, synthetic construct
STTEEIIEIIRRFLEAFDKGDMDALAELYAEHATMHTPNGRTFTTRDEIREWFRELFEKAEFHRTEVEIHVDKDTATVHVHVTVTHGDETYHARVTSHFRFKDGKLTEERIQVDSGD

SEQ ID NO: 234 - protein, 117 aa, synthetic construct
MTSSEIVEIDRQRFEAFDKGDMDRLLELMHDDSTMHTPGGRTFTTKEEIKEWLERLLSNSDIKHTELHIHTTKDTVTATVHVTRTHGDQDYHVTFHYHLTYKDGKLTEVHIHSDENS

SEQ ID NO: 235 - protein, 117 aa, synthetic construct
MDTEAAIQIVRRLIEAFDKGDVDKLLSLYAEDVTIHHPGGETLTTKEEFREWFKQVKENAEFHHETVEIHVDKDHATVHFTVHVTHNNETITINVTSHFRFKDGKIKEEHVHEDENR

SEQ ID NO: 236 - protein, 117 aa, synthetic construct
MTTEEIIRIVRRLLEAFDKGDVDALLSIYADDVTLHTPNGRTFTTKEEIEEWLRRFQSNAEVHRTEVEIRVDKDHVTVHVTVTVTHGDQTFHFNVTSHFRFKDGKITEERIHIDQGD

SEQ ID NO: 237 - protein, 119 aa, synthetic construct
PGEEKIREWLKRYFTAFNNKDLDAVDSLVSDDATFHFSQGQTFHDREEFREWVERLLKTFDFQIQITELRADIDGERITVHWTVHFTNSTSTTTIDVTTHFRFDGDKLVEVHFHLNQRD

SEQ ID NO: 238 - protein, 119 aa, synthetic construct
PGEEKVKQLIERLFEALDKKDIDAFMSLYDDDATMHYADGITFTSKEEIKKWFEEVLSRFDFRHQITNLRLDLDGETVTVHVKVTFTNPTSEHHFDQTRHFRFRGDKLVEDRIQTHQTN

SEQ ID NO: 239 - protein, 118 aa, synthetic construct
PSDEEIIRELKRQYIRALNTDIDAFARMWHPDATFHYGDQTFTNKDEVREWFREWLKNFHLEIKSIEIHVYDDGRIEVHAHVQAHTPSSTYDFRATDHYRKTKDGQFRIVETRITWDE

SEQ ID NO: 240 - protein, 120 aa, synthetic construct
PDDEEEIKEWLKRFYEALDRDADQARELLHEHSTMHVYGTGRTFKNREEILEYLRKQAQHYDHEIKSIEVQPHDNGQVTATVHITIHTPTQTFQVTETHRFQKEGDTWKLVETQIRIQPT

SEQ ID NO: 241 - protein, 120 aa, synthetic construct
PSDEQQIEELLREYYRAINTDMDEFKKLVSDDSTFHFDYFKITFKNPDEVVDWFAKFASKWQFFIESIEIQPHPDGTATVTVHYTVHTDNQTVRATDHFHFEKRGDQWYLIEVRSHFQDS

SEQ ID NO: 242 - protein, 120 aa, synthetic construct
DAEEEIKELVKREAEALDKGDVDAWASLFHPDARVEHSNGEEYTNLEELKEAIRRFQKNSEVHREIKEIRIDSSTGRVTVHMTMHVTHGDQDHTFHYTVHIQFDKDGKIVEKQVHWDQQD

SEQ ID NO: 243 - protein, 120 aa, synthetic construct
PDKDEIEELLRRFYEAWNNGDFDKLRSILHPDVQYHHSSGQTFNNIDEITEWIRRFLSNADAQIEIKSIEVDKSRQTVTVHYTMHVTHGDQTHTIHATDHYTFDKDGKITRMQSHFNQQD

SEQ ID NO: 244 - protein, 120 aa, synthetic construct
DAEEEIKELLKRLYEALDKGDLDKIREILHPDVTVHYSDGTTLTNIDEVAEYVERFKRNAETHRQIDSIHIDSSTGRVTVHVTVHTTHGDSDHTFHATHHWQFDKDGKITEMRVQVHQQD

SEQ ID NO: 245 - protein, 121 aa, synthetic construct
PSREEIKELIERWYDAFDKGDVDKLLELMHPDATIHFSNGETITTLEEFREWFERWFSQFERMHRQFHSIEFHGKTATVHSTLHLTRPDGRTFTIHQTNHDTFVDDGKITEHRAHLDEKPT

SEQ ID NO: 246 - protein, 121 aa, synthetic construct
PSEEEIKELLKRFYEAFDKGDWEALLRIIHDDATFHFSKGETITSKEEFREWFERVMSQMSRIRREIKSIHIDGDRVTVHVTLHVTNDDGSHTTIHVTDTYQFDKDGKITRVESHINEQPT

SEQ ID NO: 247 - protein, 118 aa, synthetic construct
ASPEQQQRLRETVKRFYDYLNNGDIDAVMSLIADDATFHFDGRTFTTREEIKEFFEKWFKNFDVQIQIESIEIHGDTVTVHVTVTMTNDSETQHHRYTETHHLKKDGRIAQTHIQTDN

SEQ ID NO: 248 - protein, 118 aa, synthetic construct
TDEEQQRQLKTFARRFYEAFDKGDLDKLISLFADDATMHWNGQTFTTLEEIKKWLKEVMDNVDTAHEIKSIEIHGDTITVHVTVHHHHDHETHTVHVTHTWHFDKDGKIKELRAQTNN

SEQ ID NO: 249 - protein, 118 aa, synthetic construct
ADEEFQRAVKETKRRLAEALDNGDIDTFISLIHDDSTMHVNGQTFTTKDEIREFYERWLSNADVKHDIDSIEVRGDTVHVHVTVTVTHDHETRTYHVTYTDHYHKDNKLVETRIHTNN

SEQ ID NO: 250 - protein, 118 aa, synthetic construct
ASEEQIREIIKQFAEAFNNKDLDKMESLYDDDATLHISDGTTFTTPEEFRRWLEEILKRFKQLHMEVKDLHVEGDTVHVHVELHFTHDGQQVTVHATSTFHFDHNNKIKEERIHHDSS

SEQ ID NO: 251 - protein, 120 aa, synthetic construct
PSEEEIKDLLKKFYEAMDKGDMDLLRELLHPDVQVHISSDPKTFNSLEAFLEWVERWNKNVRVRREIDSIEIRGDTVTVTVTMHVTHKNGQNYTFTIHDHYHFDKDGKIVRIESQVHEHD

SEQ ID NO: 252 - protein, 120 aa, synthetic construct
PSQEELEEIDRRRLEALDKGDLDTFKKLVHPDATFHISEYQVTFTTADEYIEWWARLYSNFEVHREIKEMHITDREVTAHVTVHVTHRDGRTQTIHMTYHVRYDENGKLVELRVQVHHTG

SEQ ID NO: 253 - protein, 120 aa, synthetic construct
PSEEEIRKIVKRFYEAMDRGDMETLKRLFHPDAQMHIEKHGITFHDRDEIIDWIAKLISNSDVHREIKDQHVTSNTVTVHVTVHWHHKDGKTDTVHVTHHWHFDHDGKIKSVRITLHDTG

SEQ ID NO: 254 - protein, 120 aa, synthetic construct
PSEEEIREIDTRRIEAFNRGDMDKLAEIFHPDATIHFESYQITFHSLEEFKEWLRRWVEQIDYKIDIESMEITDRTVTVHITVHLHHKDGRTQTVHITYTIHYDHDGKIKHVRFHSDSRG

SEQ ID NO: 255 - protein, 129 aa, synthetic construct
PSEEELEEAVRQILQRLYEAIDHGDADTIRSLLDDDWRYTNNNHNQTYSRDEFLDMVKKMVSTDVRHEIKSIEIQIHPNGRTVTVTVHVTVHHTHNGSKRTVDVTDHHHFEYKGNDVKIVHTQATHRQT

SEQ ID NO: 256 - protein, 129 aa, synthetic construct
MSEEEIREAIRQAVRRFIELFNKGDLDQIKSLFDDDWRYTDARHGQTYDRDEFIEMMKELFDRDVKIELKSIEIRINPDGTTVTVTVHVEVHEIHNGQQRTVTVTEHHHFRFSGDTWRIQRTQVHFRQQ

SEQ ID NO: 257 - protein, 129 aa, synthetic construct
TSSKEAEEAIRDMLRRYYEAFNKGDMEKLKSLVDPDASFHDARTNQQYDKEQWLEYVKELLKQDAKVEVKSIHIQQQPRGDHVTVTVHVEMHVNRNGQTHTYTITDHYHFVRKGDSWKITRVQSHTHQQ

SEQ ID NO: 258 - protein, 129 aa, synthetic construct
MSEQELKEAIKEFVERYVELLNRGDADTLAELIDEDWRLHDARTNTTYDKEQFKEWVEKTFKNDTKVELKSIHIQVDPNGNTVTVTVHLTYHTTKDGETRTVDVTEHHHFTFEGDSVKLKRTQVHHHQR

SEQ ID NO: 259 - protein, 129 aa, synthetic construct
MSEEEIKSAIEELVRRFYEAMNKGDMETIERLVHDDATFHNPDTGQTFDKEEFKEWVETLFRRDTKLEIKGIEIHVDPSGKTVTVTVHVHMTTNKDGQTHHYTVQHHWVFRYKDNSFYIVHVTVRTEQQ

SEQ ID NO: 260 - protein, 129 aa, synthetic construct
PSDEELEKAVREWIKREAEAFNKGDMETWYSLFHPDARFTDARSNTTYDLEEVKRMIKEMVERNTRMQIDSIEVRVDHDRRTVTVTVHVTFQTTRNGKQQTVHVTYHLHFRYEDNTLKIIHKRAHHNQS

SEQ ID NO: 261 - protein, 129 aa, synthetic construct
MDEEEVKEAIKDTKRRLIEAMNTGDMDKLDEIYHPDAQFTDNNTGQTFDKEEFKEWVKEQHKMDAKIEVKEIRVQQNDNGETVHVTVHVQIHTTHNGENRTFNVTTHDRYQFKDDTVKIVESRYTTNQT

SEQ ID NO: 262 - protein, 129 aa, synthetic construct
MSDEEFERAIREYKRRLIEAFNKGDMEALRRLYHPDVTFHDARTNQEYDLDEWLEMVKELLRQDAKIELKEVHIQVHDNRKTVTVTVHVQVHVNRNGQTHTYDVTYHDHYRFKDDTVRIVRVQVHHRQT

SEQ ID NO: 263 - protein, 130 aa, synthetic construct
ADEEELKEQAKELIRRYYEAWNNNDADTIADLLDEDVTFHNHGQTYRLSRDEVKEMVERLASQDYQLHMRSLEARVGDSNTITVTVHVTMHSRHDTGTRTTHFTDHYVFEYKNGEMKIVEVHSSRETRQT

SEQ ID NO: 264 - protein, 130 aa, synthetic construct
TSEEEVREAVKELLRQYFEAFNKGDWRTIADIVDENVTYVHNGQTYNLNKEQIVEWVKEMKKNNYKLDIESIEIRVGDSKNATVHVTWTMHVTHDTGTRTIRATTTFHFRQSEGPWKIVSVQTDYEERQN

SEQ ID NO: 265 - protein, 130 aa, synthetic construct
PSEDELKEQAKELIERFFEALNKGDWDTLAKLFTDDVTFVHNGQQYDLNKEQFIEYVKELFKADTKFHVESIEFQIGDSNTITVHVRWTAHTTHDTGTRTVHANTTFHFVANDGPMKIKRVEVDWEERQN

SEQ ID NO: 266 - protein, 128 aa, synthetic construct
PDEKEMEEEVREFDKRRVEAINNRDLEKVKSLVHPDATFRFAKTQKDYDKEEFAEWVERMLRNDTQIDIDEVHVEIKHKTQATVTGHITFHTTHGNRTITFHVTYHVHYRRGTHGWKLIRLQLHFNDS

SEQ ID NO: 267 - protein, 128 aa, synthetic construct
PDDKKAEEDLREIKQRLLEALDKGDWDAVRKIVHPDATFHFESHQQTYDLEQFVEWVKQMASQGTQRHIHRIEIEKKDEHEYTVTVHVTAHHTHGTKNVTVRFTFHDRYRRDTHGWKIHEVRVESDDS

SEQ ID NO: 268 - protein, 122 aa, synthetic construct
SDLQEQIKELIERWVEAWNRKDLEAIDSLYHPGAQVDDNQIDKEQFKKRVKEILDNTDTQLHIDEIRIQIGDDTRITVEVHVTVHRNEGDRTYTFHITTTFHFRLINGQWYLIEQKTHTNST

SEQ ID NO: 269 - protein, 122 aa, synthetic construct
PEWEEAVREIIRREVEALNRKDLDKWASLYHPGATDHTQNRDLEEMKDFWRKRLENSNIHIEIKEIRVQKGDDTEVTVEVHVTFHWDHGDRRETYHVTYTMFVQLRNGQWKIVRKQEHHNST

SEQ ID NO: 270 - protein, 126 aa, synthetic construct
PEEEEIRQAVEEIVRRFYDAFNKNDLDAMASLFDDDWRFHNDSTQTTYSRDEFKDMMKKLLEQGWQLHIKSIEIRINPDGSVTVTVHVQAHNQTSNQTVDVTDHHHLRRDGDEWRIVRTQSQSHQT

SEQ ID NO: 271 - protein, 126 aa, synthetic construct
PEEDEAKRDIKDIARRFYEALNNKDLDKAASLFHDDAQFHFDNTQRTYDKEQFREWVKKMLDQDWQMHIDSIETRVDNDGTYRTTVHVTIQNSTSNQTQHVTHHWVFRKEGNKFKVVELQERTDST

SEQ ID NO: 272 - protein, 127 aa, synthetic construct
PSKKDEEDIRTWVRRFYAALNNKDLDAVMSLYTPGSQFHFESTNRTFDREEFRKWVEEAMRRDQEFHIKNIRVERDDDDHFTAEVHVEVHNRKTKVTFTVTQHFHFRKSDGRWRLTEDRIRTHEHPK

SEQ ID NO: 273 - protein, 127 aa, synthetic construct
PSKEDQEAIEEWYRREEEAFNKGDLDTWASLFHDGSTYHDETRNQTYNKEQLREMFKKLFDQGWQMHIKHIEIRLEDKDTFTVRVHFEFHNKSTKNTFHVDATDRFTKSDGRWKLTERRERRHEQPT

SEQ ID NO: 274 - protein, 127 aa, synthetic construct
PSEEAQKEIERIIREMYEAFNKGDLEAIYSLLAPDWTFHNESNNQTYNREQFKEMVEKLIKAGFKIDVESIEIRAPDKDNYTARVHVTVTNKQTKDTFKTTDTHHFRRSEGTFYLLETRVTMDRHPT

SEQ ID NO: 275 - protein, 127 aa, synthetic construct
PSDEDEREIREWYKREAEALNSGDVDAWKELFHPGAQFHDQTRNQTFDLDEMREWVEKMIRAGFRFHITSIEIRVDDKDHITVHVHFQVHNEKTGDEFRFDSTDHFRKSHGRLRLTERQIRTEEYPS

SEQ ID NO: 276 - protein, 127 aa, synthetic construct
PSEEQQEAIKEFKKRFYEALNKGDLETIKSLMHPGATFHFESRGQTYDREEFIEIVEKLIRANFKFQLDSVEIRKDDEDNITVHSTVTMHNDSTQRTFHVDATDHYTYSNGELRLTHSRFRTHEQPT

SEQ ID NO: 277 - protein, 127 aa, synthetic construct
TDKEQEEKIREWLNRFYEALNKGDLDAIDSLLTPGWTYHDKSRNQTYDKEQFRDMVEKMMRNNLRIEVTSIEIRSDDDTTATVTVHVHVTNDQTGTQFDVTDHHHFRLSTGELRLVETHFETHSKPT

SEQ ID NO: 278 - protein, 123 aa, synthetic construct
ADPSDQEIVKQLVERLFEAINKGDRDTIKSIYAPDAQMHISQEQVTFDTLEEIAEWLVKWSSRYDIQIDSLRIELHGDYVHVTVHVTIRQRGTGKTIRVTSHITFDKNGWKIKREHVHFDNGE

SEQ ID NO: 279 - protein, 126 aa, synthetic construct
MSEDEMREAIKEVKRQLIEAMNTGDLDTLRSLFHPDATFEHSSGQQYDLEEFLEMVKKLNENNVRIELKEMHIQIDSDGRHVHVTVHVQFHNATTKQTYKVTAHDRYRFDGDTVKIVETTFHHHPT

SEQ ID NO: 280 - protein, 126 aa, synthetic construct
TDDEEAEKKVRDWFREYARAFNEKDVDALASFYHPDARLRDPNGRDYSYEEIREWYERVLSNDAQITIHSMEIRFDSDGHHVTVRVTMTFHNSRTGETYTVHAHFHFRFNGDTLKLVHVQYHHHST

SEQ ID NO: 281 - protein, 131 aa, synthetic construct
PGEEEAEKAVREVLRRLFEALDNKDWKTLSELYDKDATFHHTDHGETQTYTKEQFIRRVRSNKDIQTAHHMKSIEIRIDSDGHNVTVTVHVEVHETRGDKTDTITVTRHFHLRLEGDSWKVKRDTSHRDSS

SEQ ID NO: 282 - protein, 131 aa, synthetic construct
PGEEEIKEAAKELLRRFYEAVDKNDIDTLRSLLDKDWKYHETRDGKTETYDADQFLERIARNKDVQVHREIKSIEIRVDSDGRTVTATVHVQVHEHHGDKTHTVDVTDTHHLRYEGDSFKIVETHAHYDSG

SEQ ID NO: 283 - protein, 129 aa, synthetic construct
PQEEEIKEAVKQIVERLIEAINNNDWEKFASLYTDGSTFYLSQTGQHYDLEQFIEWLKQMASTGFQIEIKSIEIRINGDSREATVRVHFTLHQTRNGQDYTIQVTSEIRIRQDDSTFKILSERVHFSDS

SEQ ID NO: 284 - protein, 129 aa, synthetic construct
MSEEELKRAVREVDERRFEAFNRGDMDTIRDIVHPGAQYHDASKQRTFDKEEYLKMLEELLSQDVKIQIKEIHIEVKDDGTVTVTATVEVHRNHDNETRTVEVHYTIFYRLQDGQWKIVEMRESTDSGE

SEQ ID NO: 285 - protein, 129 aa, synthetic construct
MSEKELEEAVRDALRKFYEALNNGDWEKVARLVHPGAQIHFASTQRTYDVEEMIEWVKKMFSNDTEIHIDSIEIEIKDNGEVTVHVHGQMHTNHDNRTITARVTDTYHFRLSNGRWKIVELHSTIDNGS

SEQ ID NO: 286 - protein, 129 aa, synthetic construct
MSEKEFKEQIREWVQRWVELFNQGDADAMKSLYADGATIHFSATQQDYSKDQFREWVREMFEADTKMQVDSIEIHIYDDGTVTVHVHMTLHTHHPDRTQTVQATFTFHFRFENGSLKLTRQEVTYDSRS

SEQ ID NO: 287 - protein, 129 aa, synthetic construct
MSEEELKEAIKEIKERLARAMDSGDADTFASLVHPGAQFHDERTQQTFSIEEMREMIKEIAKSDTKRQIDRIEIQIYKDGEVEVRVHVTVHTHHDNETKTQWATYTDRYVFQNGQVYLTESRVTYDSQS

SEQ ID NO: 288 - protein, 129 aa, synthetic construct
ASEEEQREAIKEMIKRLVEAFNKGDADALKRLFHPGWTYHNNAEQRTFDLEEFREWVRKVFSQDTKVQITSIEIEVKDDGRVTVHVHVKYTTHHSDQTRHVDVTETHHVEFHNGQLRFVETHVTWDSGS

SEQ ID NO: 289 - protein, 129 aa, synthetic construct
ASEEEQREQIKEWIKRFLEAFNNGDLDTLKKLFHPGIQFHFSSEQRTYDLEEFIKMIEELLSQDTKVHLHQVDIEVRDDGTVHVTAHWEFRTHHDNKTKTVRVTTTFVFEFHNGSMRLVEVRITHDDGS

SEQ ID NO: 290 - protein, 126 aa, synthetic construct
DEEEIKKQIKEILEQFYEAFNKGDMDRIRELVHDDATFHNQSDPKTYNKEQFLRMLEELFKQGVTMEIKSIHIDVKSDDAEATVHVQFHRTHGDETQTYDVTHHWRFRRFGDEWKIVEVHERTHQT

SEQ ID NO: 291 - protein, 126 aa, synthetic construct
DEEEDKKEIKEWLERYYEAFNKGDMDALRELLSDDAEFHNQSDPKTYDKEEWLEMLEKLWKQGTRMQIDSMEIDPGSDTLTVTVHVTVTTHRGDKTRHTTFTHHWHFRLEGDSWKLVRVEERTHQR

SEQ ID NO: 292 - protein, 126 aa, synthetic construct
TPEEIEKAMRDIKRRYVEAFNKGDMDTISSLLSDDAQFTFSSDNRTYDKEEYLEMIKKLLSNDAKVEIKEQHIDVKSDTVTVETHVQIHVTHGDETRTYDITTHDHYERRGDQWYIVHTTITTRQT

SEQ ID NO: 293 - protein, 126 aa, synthetic construct
DEEEAREAAERIIRALVEAMNKGDLEAIMSYYDDDATFTNASNNTTFDKEEMKKWFKDFFSSGTQVQIDSIEIHVHSDEVRATVHLTMHTHHGDKTRTVHYTSHFVLVRKGDEFKIVHEKLQSDQA

SEQ ID NO: 294 - protein, 126 aa, synthetic construct
TPEEIQEQIKEAVRRMFEAINNGDADAVMELVHPDATFHHESNSTTYDKEEFRDWVEKFFKAGMRIEVKSLEVDVKSDTATVTVHWTVHQHNGDKTRTVNATTHIRFTRFGDEWKIIEVRIRTHQT

SEQ ID NO: 295 - protein, 128 aa, synthetic construct
PDPSDQEAIRQWFRREVEAINKGDIDAWASLFHPDSKYHHQSGQTYDYEQFIEMFERLMKTVDVKIEIKSLEIRQTKDGNEIEVHVHVTVHENHPNKTRTVQVTQTDRFEKRGDQFYLAERHTHTDGE

SEQ ID NO: 296 - protein, 128 aa, synthetic construct
IDPSDEEAIRQLIERFYEAFNRKDWKAVADLVHPDATYHNSDGQTYDWEQFVEMVRRRIERFDIKMEIKEIRFQPTPDGNEITVTVHVQVHVTHDNETRTFQATHHWFFRKIGNQWYIIRLEERRNGT

SEQ ID NO: 297 - protein, 128 aa, synthetic construct
ADPSDQEDIKRIKRRLAEAFNKKDWEAIARIFHPDATFHHENGQTYDWEQYVEMVKRFLEKFDARFEIDHIEIRLDKDGNDFHVTVHVTVHTTNDNQTRTVHITQHDRYRKEGDQWYIIESQTHTSGR

SEQ ID NO: 298 - protein, 128 aa, synthetic construct
PHEEEQKDIKEWFKRYAEAWNKKDWETLARLFHPDATFHHQSGQTYNWEQYVEMVRRFLSTTDSKIQIHSLEIRLDKDGNKITVHVTWTMHTHHDNQTRTVTGHTTFFFVQEGNQWYVKEVRTTTDGS

SEQ ID NO: 299 - protein, 128 aa, synthetic construct
PHEEDQRELEEIIRRYYESFNQKDWQAAADIVHPDVKYHHQSGQTYDYEQLVEMIKRLFENADVHIEIKHIEFRQHKDGGRATVQVHVQVHVRHDHKDTTVDVQHHWVFEKRGNTWYIVSVEERTDGS

SEQ ID NO: 300 - protein, 128 aa, synthetic construct
PEEKEIEEAAREVIKRFYEAFNKRDMDALEELLHPDARFHTYQGETYDVKQFKEMVERLLSLDIKIDIKSIQADTFKDGTATITVHVEVHVRHDTSTHTVRVTHTWHVELQPNGELKIKSLQENRDND

SEQ ID NO: 301 - protein, 128 aa, synthetic construct
PESEEIQEQIKETIKREAEALNKRDIDAWASLFHPDARYTENNGRTYDYEQMKEMVERWLSTDVQVEVKSIRIDDTKDGTGTGTVHITFTQHHDTETRTVRVTYHIHMERDHNGEVYIKEKHARRHDS

SEQ ID NO: 302 - protein, 128 aa, synthetic construct
PESEEIEKQIREWLRRFYEAFNKRDLDAIASLFDDDWRYYNHSGQTYDKEQFREMVEKLLSTDAQIDIDSIQVDDTKDGTATVTVHLTVHERHDTEQRTVRTTDHHHFRLQPDGQLKITHTHEHRDND

SEQ ID NO: 303 - protein, 128 aa, synthetic construct
PESEEIQEKIRQWLRRFYEAFNKGDWEALASLYAPDARMEHNNGQTYDYEQIVEMIKRLLSVPIKMEIKRIEIESTKDGTGTVTVHVQVHTHHPTSTHTVDVTQHIHFEVQPNGELKIKRDRESSHNS

SEQ ID NO: 304 - protein, 128 aa, synthetic construct
PEEKEIEDLVREWLRRFFEAFNKRDLDKLKEMFDDDWRFHNANNQTYDRDEFKDWVRKLLSVPIRVQVDSIEVKDVKDGTATVTVHVTVHEHTPTKTKTVRVTEHHHFRVQPDGSIKITRTEVRHHDS

SEQ ID NO: 305 - protein, 128 aa, synthetic construct
PEDEEIKEAVKQVVERFFEAMNKGDLDELKSLFDEDWRYHHASGQTYDLEQFLKMVEEFHSVPTRIQVKELRIDDTKDGTATVTVHVEVHETHKDSHHTQRFTEHHHFERHDSGEFRIVETRTQTDDS

SEQ ID NO: 306 - protein, 128 aa, synthetic construct
PEDDELRQAAREIIKRLYEAMNNNDLDTLRSLFAPDATFHHNKGETYDLEQFLEMVERLASIDTRIQVDSMEVKDTKDGTATVEVHVTITQRHDTSTHTVRFHHEWHVRRRPNGQVYVKELRIQSNDD

SEQ ID NO: 307 - protein, 130 aa, synthetic construct
PREEELRRQIREFIKRLVEALNKRDVDHWLSMFSDDWTYHDSRDKKTFDKEEFAEMLKELLKFPFQIQITSIEIRIYPDWRTATVHVTVTLTVHRGDETRHVNATETHHFRFTENDLRIKETRVNYSGEQ

SEQ ID NO: 308 - protein, 130 aa, synthetic construct
PEEKEIEEEIRDVDKKRVEAFNNRDMDTWKSLFHPDATFHFYEDKKTFNLEEVVKMIKELLSFEMRVEIKEVHIEFEPDKSRVTVTARVQFHVTRGDKTVTVHVDYTFHYQRSKDNWKIVEVRIRTSGDQ

SEQ ID NO: 309 - protein, 128 aa, synthetic construct
PSKKQQEDIRDIVRALFEAFNKKDWEKMASYYDEDARITFTSTNQTYDKEQFIRIIQELLKQDYHLHVHSIEIRLGSDNNTVTVRVHFTMTQQTTGTTFEATSEIHITREGDQWKIKEEHITMRSQPT

SEQ ID NO: 310 - protein, 128 aa, synthetic construct
PSKEQQEQIKELKERFIEALNKGDWKAIAELMHPDAKYTDNSTNKTFDREEIEELVKKQFNAKLHFQLDGIEIRLDPSNTDIRVTVHLTVTQADTKTTVKATTHDRYVRFGDEWKIVETQTTRHEQPT

SEQ ID NO: 311 - protein, 128 aa, synthetic construct
PKEEELKRQVREFDERRIEAINRKDLDKVKKLFDDDVTFHFAATQQTYSAEEFLEMVKEWLDNDVKIDIRSIHIQVVGDGTVHVTVHVTMHVTRNGKTDTVHVTYTITYQLKDGSWKILRMQVHIHPT

SEQ ID NO: 312 - protein, 120 aa, synthetic construct
VSEEQVEEWVRRFFEAVNKNDRETLKKLFHPDVTFHFNEGDRTITYTTLEEFVEWLEKFAQNYHFEIKSIEIETKGDEVTVHVTWEVTNRTQGHTYEGHTTVRFDKDGRVVEVRFTFDST

SEQ ID NO: 313 - protein, 120 aa, synthetic construct
MSEEQVKEWVKREVEALNNGDLDAWASMFTPDVTVHFFHGDTTYTFKTLEELKEWLEKWLRNFQIHIKSIEVQTDDSSVTVTVHLQVTERRTGRTFDVTFHDHFDKDGQLVERHVHFNHS

SEQ ID NO: 314 - protein, 120 aa, synthetic construct
PSKEQIKEFVKREVEIFNQGDLEAWASLYAPDATVHFYHGDETYTFTTREELKEWAEKFWRSHTVQLDSIEIRHDSDTATVHVHLTVHNRDTGKTAKVDSTVHFDHDGKLKEKHVRFRDT

SEQ ID NO: 315 - protein, 120 aa, synthetic construct
PSQEEIKELVKRFYDALDSGDMDTFDSLIAPDWTYHYYQDNTSITFKTREEFKKWVNEWASFVHRTFRSMEVRKDGESVTVHVEVQVTDSRTKQTFDTRDTHHFDHDGKLRETRSQYHST

SEQ ID NO: 316 - protein, 120 aa, synthetic construct
PSKEQIEEWLRRFYEAFNKGDADAAKELMDPDSQMHVQEGDETHTMTTQEEIKKWIEEFAKDHEIEIHSIEIRHEDSSVTVTSHVTVHNRKEKQTYEATETHHFDKDGRLVETHTHFHPT

SEQ ID NO: 317 - protein, 128 aa, synthetic construct
DTPERQEAVRQLIRRYFEAFNSGDWEKLASLYTPDSRVHNPATGTTLNYEQVVRWYQKQMSRDAKMELKSVEIRINDDGTVTVRVTFTMHFTQDGQKYTTHIHATFHVERGDSSWRFKEVRFQRDTRG

SEQ ID NO: 318 - protein, 128 aa, synthetic construct
DDEKNEEDVRELLKRFYDAINKGDLDKIRSLMDEDWRYTDASRQQTFDLDEFLDMIKKMHSNDTKVQIHSIEVEIHDDGKVTVTVHVTFHSNHNGQTYTTHVTDTHHVDYGDSSWKFVRTQTHRDTRG

SEQ ID NO: 319 - protein, 128 aa, synthetic construct
DDEEAEKAVKDWLRRFAEAFNKGDMDTLKELFTDDWRFTDARTGTTIDLDQFMDYLRKLLSNNARMQIDSVEIHINDDGTVTVHVHVTIHSTHNGQKYTFHVTETHHFRRGDDDWKVVRTQAHTESRG

SEQ ID NO: 320 - protein, 128 aa, synthetic construct
DDKDDEEAVRQTIRRWAEAFNKGDADALYELYDEDSTIHDPSTQQTYNVDQFKEMVKKLQSQDVKLQVHSVEVEIHDDGSVTVHVTYTVHSTHNGQPYTVEFHTTFHVEKSEDRYRIVEQRDSNDQRG

SEQ ID NO: 321 - protein, 127 aa, synthetic construct
MSEEELKRAIKELKKRLVEAMDSGDWETVKKLFDDDVTFHDPSKNQTYSVEEFVRMMTKLASRGIHRQIDSIHIEFSDDGTAHVTVHVTVHERHGDKTHTFTATAHDTYRFENGSLRILSSTFNTDS

SEQ ID NO: 322 - protein, 129 aa, synthetic construct
DKEEQKKQVEEIVRAFYEAFNKKDLEKIRRMLHPDATYHQQRGNQEETYDYEEFIDMVRERLKFDFRIEIKEIRIQVLDDTQIEVEVHVTFHWTHNGKTKTVDVTHHWVFRLTDTGWYLIELHARHTEK

SEQ ID NO: 323 - protein, 129 aa, synthetic construct
DFPKAEEDIKRLKKRFVEAMNHNDWEKLARMFHPDAQFVFINGNQREQYDWEEYVRMVQELAKFPFRIEVKSIEVRKVDDTTYTATVHMTVHFNHNGKTNTVTVTQHDVYRQEKDGWKVLETQEQHDQE

SEQ ID NO: 324 - protein, 129 aa, synthetic construct
DEPEQQEQVERVIRRFYEALNHKDLDTVRELIHPDATFHTFRGDEQQTYDYEQYIRRIEEMAKFDFRIEIKSIEIRVDDKNRVTVTVHVQVHVNRNGQTHTVNVTHHWTLQQTSTGWYIIEVRSRFDNS

SEQ ID NO: 325 - protein, 129 aa, synthetic construct
DKPKAESDVRETVRRFYEAMNKRDLDKLRELLHPDAKVTQYEGDQQKDFDYEEFLKMVKELASIDFRIEIKRIEVEQKSDNEFTVRVHVELHFNHNGETHTVTATHEWHLRRTSTGWYIIEVRERRDQQ

SEQ ID NO: 326 - protein, 129 aa, synthetic construct
DEPEVREQVKEFKRRLLEAIDKGDWEKFARLVHPDAQFTHTHGDQSQTFDREEVIRMIQEQSKFPTAHHMKSIEIRKVDEHEFEVRVHVEVHENRNGQQHTVTVTYHDRYRRDSTGVKLIETQTRFTNQ

SEQ ID NO: 327 - protein, 129 aa, synthetic construct
DQPEQIEHVLEIVRRFYEALNHKDLDKIRELIHPDATFHHTHGDKTETYDYEEFLKMVREMMKFDFRIEIKSIEVRIDSKNEITVTVHVEVHETHNGEKRTVTVTHHWRLRRTKDGWYIIEVRETRDQQ

SEQ ID NO: 328 - protein, 128 aa, synthetic construct
MSEEEQKEAIKEFKKRVIEAFNKGDWEAVRRLFTDDVTFHHDSGETYDLDQFAEMIKKQKSTDAKMELKEVRIQVDENNTVHATFHVEVHRRHGDKTTTIEYTSHDRYRFENGQMKIVETHIHSRQRQ

SEQ ID NO: 329 - protein, 128 aa, synthetic construct
MSEQELEEAVREWLERYYEAYNKGDVDALRELIHDDWRNTEENGTTYDKEEFLKMVEEQMSNNTQLDVKSIEVRVDEDGTVTATVHVQMHTTRGDKTHTVDVTETHHFRFKDGQLRLVETRFTHDDKS

SEQ ID NO: 330 - protein, 128 aa, synthetic construct
TSEKEAEEEIREILRRFYEAFDRGDADALMELLHDDVRFHHESGETVDKEEFRERVERIASTDTAHKIDSMEIRFDSDGRATVTVHVTVHQRHGDKTVTRQVTHHWFFRKKDGEYYIVEVRIHTRQED

SEQ ID NO: 331 - protein, 128 aa, synthetic construct
MSEEELKEAAKEFVRREVEAFNQGDADAWASLFHDDVQFDHARGTTYDKEQMKEMIERLLSNDTKVQIDSIEVRIDGDGTVHVTVHVTVHTTHGDQDHTYHVTEHITFRLENGRWKVVRKEIHTNQTQ

SEQ ID NO: 332 - protein, 128 aa, synthetic construct
MSEEELRRAVEEWLRRFYEALNRGDWEAVAKLVTDDATFHFDEGQTYDKEQFVEMIRQMLSFNVQIQIDSIEIRVDSDGTVHVTVHVTVHETRGDKTVTVHITETHTFRFENGRLKLVETHIHTDNTK

SEQ ID NO: 333 - protein, 129 aa, synthetic construct
PSSEELKEAAREVIERFYEAVNRNDLDKLRELIHPDATFTHESNPQTYSAEEWLKRFEERVRAGAQLHLQIHHIEFQTDDNGEITVTVHVTVTNSQRNKTVEVTHHWFLRNINGQMYIVHVRERTDNKE

SEQ ID NO: 334 - protein, 129 aa, synthetic construct
PSEEELRELVKEWVRRYFEAWNKNDWEKLKSLFDDDWRFHDSDENTTYDLEEWVERFRQYVSSGNDTQLQITSIEIEVKPGGEVTVTVHYKMTNKKTGTTYDVTEHHRFRNENGSLKLKETRTTTDRKE

SEQ ID NO: 335 - protein, 129 aa, synthetic construct
PEKKKIKEDIKELIRRYFEALDRGDWEELEKLMDDDWRYHQNYENQTYDKEEFLRWVEKMASQDTAHHIKSMEIRVNDDNTHVTVHVHVEVHHNRNGKTKTVRVTETHHFQRKGDTWKIVETRVTHDDT

SEQ ID NO: 336 - protein, 129 aa, synthetic construct
PEEKEIREQLKEIVEKFFEAFDKGDVDKLKSLMAPDAQFHFSGENQTYDLEEFLERVQRFASQGTAHELESIEIHVNSDGTHATVHVHWTLHVTRNGETRTFRGTTTFHFQRRGDSWRVVEVEFRVQPT

SEQ ID NO: 337 - protein, 120 aa, synthetic construct
PEDRETIKELIKRFFDAINNGDRDTLKELLHDDAQMHVAAEQRTFDTKEEIVRWLVEMASTMHIEIKSIEIRKDEGDQWKVTIHWTGRRRNEPSDFDATTHMRFDKSGKIVELRFHVHQT

SEQ ID NO: 338 - protein, 120 aa, synthetic construct
PEQEERIKEIIERFYEAINHGDMDTLRELLAPDWQFHDNANQITFTTLEEFLQWIAEWAKNFRIEIKDLHIQPGDGDTVTVEVHYTIHNKTNPTTYTATDTHHFDKNGKIKETRSTVHQN

SEQ ID NO: 339 - protein, 126 aa, synthetic construct
PSEEQQEKIKELKKRLVEAFNKGDWKALRDLFHPDVTFHISDNKTIKTLDEFIEWVKKFFQNIQLHIKSIEIELKDDTTVTVTVHVEIHRTRGDKDDTATVTFHDVYRFENGQLKITESEARFQPS

SEQ ID NO: 340 - protein, 130 aa, synthetic construct
PKEKEQIEAIREILRQYYEAWDKKDLDKLRELLHPDWTYYDSRTGQQYDREEYIKMVEEMLSKFKDVRHEIDSIEFEINGDEVTVHVHVTVTFNTGNQQHHVQVTETHHFRQEGDRWKIVRTQTTTNNTR

SEQ ID NO: 341 - protein, 130 aa, synthetic construct
PKEKKMEEQVRDWVRREIEALNKGDMDTWASIFDPDVTFHFSDTGTTYDRDEVKEMFERFLKRFKDTRIEIKSIEIHIDGDHVTVHVTVQVHVNQGDRTYTNHYHQTIHFRFEGDQLKITEKHVTTDNSD

SEQ ID NO: 342 - protein, 130 aa, synthetic construct
PKEQELEEAAREWARRFYDAIQKHDLDAIASLYAEDSRMHNSDTGRTFDREEIIEMVKQFLERFKDTRVEIKSMEIEIRGDTVTVTVHVTITFNRGNQQYHVNFTQHFHFQREGDEFKLKHDEASTDNSD

SEQ ID NO: 343 - protein, 128 aa, synthetic construct
PGEESAKEAVKQFFTRFVEAVNKGDMDKVRSLFHPGSTFHHDRKGQTYDLDEFIDIVEKLAKAGMQIQIESIHVEQLPNGQYRATVHWTATVHHNGRTYTFHGTTTVRLEYHGNEWRVVELTVNIDST

SEQ ID NO: 344 - protein, 128 aa, synthetic construct
PGDETAKEEIKRFLKQLYDAFNTGDMDKIKELLHPGWKYYDATKNQTYDKEQFLEMVKKLLSQGVQLQIKSIEIDKDKDGGWTVHVHVTFTVTHNGENKHFDATETHFFRFEGDTLKLVETRVNEQPS

SEQ ID NO: 345 - protein, 129 aa, synthetic construct
PSQEQQEAIKDFKRRYVEAFNNGDLEKLKELFHPGSQFTHESHQQTFDREEFIEMLEEMLRHNTKIQIDEIRIELKGTHEVTVTVHMTVTTHHDTETRHVRITQHDHYRLENGTWKLVRTHVETHEQPS

SEQ ID NO: 346 - protein, 129 aa, synthetic construct
PSKEAEEAIREWIKREVEAFNKGDLDAWVELFHDGAQLHVEATQTTYDKEEMRDYIRKLLSQDTKIQITSIEITQHGEDEYRVTVHVQVHVHHDHKTVTTDVTATFFIKQQDGEFKIVSKHVERDTKDT

SEQ ID NO: 347 - protein, 130 aa, synthetic construct
PPEEEIAEAARQIVRRLVEAFNNNDMDALEELYHDDARIHQPNGETYDKEEFKEWVREFIEKNNAKVEIKSIQVQSIDSNGEITVEVHVTVTVHRNGQQFHSDVTSQFRFRKKDGSFKILSEHIHTDDKD

SEQ ID NO: 348 - protein, 130 aa, synthetic construct
PEEEEAKEAAKDTVRRWAEAFNNNDLDKLEELYHDDARIHHASGQTYDKEEWKRWVEEFISKFDTKIEIHSIHIVQIFSDGTITVQVHVTLHANHNGQTYTVHFTYHFRLVKINGDWKILRQEERRDDID

SEQ ID NO: 349 - protein, 120 aa, synthetic construct
MSKEQIKELLKRLYEAFNKNDLDKLRELFHPDATIHFSRYGITFHDLEEFLEWVERFIKTFNVHIQITEIRIDDTELRVTVHVEVHFHHPGETRTVRVTEHHTFRDGRLVETHTHFQPQE

SEQ ID NO: 350 - protein, 119 aa, synthetic construct
MSEEEIRELKKRLAEAIDKGDWETVARLMTPGATFHFQSENYTATDLEEFIRWVQEWFKRFPDVQRTLESIEVNGHTVTVHMTVHFHHKDETRTVRVTVHDHYRGNRITESRFHFNEEK

SEQ ID NO: 351 - protein, 121 aa, synthetic construct
TGKDHIKEILRRFYEAINRNDLDALAELFHPGAQIHFWNGTTLHDLEEMRRFFKKLFEDLEDVKIQIEEIHFDGSTATVHYTVHVHHSSGKTVTFRGTDHFRFRNGKIQELRSHVDSTHGS

SEQ ID NO: 352 - protein, 122 aa, synthetic construct
PSEEVKEIIRRAYEAFDKGDWETLRRLFTPDAQFTTHNSDGSTIHVTTQDEFREWFERVKSTFTEMHREIKSVDATGDTVTVHGTVHFTRPDGQTYTIHVTHHWTFENGKIKEVHEHIDYGG

SEQ ID NO: 353 - protein, 117 aa, synthetic construct
ASQEEIKEFLKRFYEAVNRGDLDTAHEMLHPGWTFHHASGETLKSRDEVRKWLEDFSKTYQLEVTSIEVHQNPDGTYTAHVHVNVTNKNTQTTITFSDTHHFDRNGKLVETRTQETG

SEQ ID NO: 354 - protein, 117 aa, synthetic construct
TSKEEIEEIIRQMYEALNTGDRDAIKEYFHPGAQLHIWNGQTFDGLDEIAEFLVQFASEYQMQIDSIEIHKNPDGTYTVHVHVTVTNKKTQQTYRQHHTWHFDHNNKVVEVRVQMTG

SEQ ID NO: 355 - protein, 119 aa, synthetic construct
TSEEEIRRWLKEFYEALDNGDLDRLLELIHPGATFHITDGETLTTKDEIKEFLREFFERFSDLKHDITQIDIDGNTVTVHVQVHVHHPNKTVTIDITEHHHFKDGKLVETHVHIDQKDN

SEQ ID NO: 356 - protein, 119 aa, synthetic construct
PISEEQIREVVKRLFEALDKGDWETFERIYTDDSTIHIDDRTFTDKEEFLRWFEQFHKTFKDVQHDIESIEIRGDTVTVRGTMTVTHGDKTQHYTVNSHFHFKDGKLKSERIHRHRQPR

SEQ ID NO: 357 - protein, 122 aa, synthetic construct
PTEEEIKQLVEQFYESLNRRDLEKVASYFHDDATMHIDQGTTFTTLEEIKEWFERFLKRFPRFRIEIESIEFRGDTVTVHVTVQHHRRDTGKTFHTRVTHHWRFDKDGKIVELHIHSDTKES

SEQ ID NO: 358 - protein, 119 aa, synthetic construct
PASEEIIRELVKRYYEEFWNTGDADRAAELLHPDATIHYYNGTTLTTMDEIKKYLEEFLKRFSRVHVEIESMEVRGDEVTVHVRMTTHHGDQTYHYRITHHWRFKDGKIVEVHIHENQE

SEQ ID NO: 359 - protein, 119 aa, synthetic construct
DELKEIINRILKAIYDSKDPKAARDYFHPDATITFKSEQQTYDLDQYIKWFEEFMRTFPDATFQIDHIRVDGDTVTVHWTVHVTDQRTGETYTTHATTTFHFKDGKITETHYQLHTQKT

SEQ ID NO: 360 - protein, 120 aa, synthetic construct
PSRERIKELIKRYYDAYNNRDLEALKEYLTPDATMHIDATKITFTNLEEIEEWIRRFLSRYKDFRFEIDRIEIDGDTVTVHVTVHFTHDNNQTFTYEVTEHHHFSDDKIVETRTHVHERK

SEQ ID NO: 361 - protein, 119 aa, synthetic construct
PEEEEIKEWVKKYIEAIFNTKDIEVARQFLTPDWKFHNNSEQRTYDREEFAEMLEQFQKKFPDAKVQIHSIEIRGDTVTAHITVHVTDKDKDVTIHVTEHHHFKDGKITETRVQEHTQE

SEQ ID NO: 362 - protein, 118 aa, synthetic construct
PSEEEIKELLKRFYEAFNKGDWETLLDLFSEDSTIHFSNGETLTDLEEIRRFFERVLRNRVQIEVKSIHIEPGAGRVTVHVKFHQNRDGRTYTFDVTEHHQIRGKKIVETHFNWDNHP

SEQ ID NO: 363 - protein, 122 aa, synthetic construct
TSQEEIKDLIKRYYEAFNRKDLDALSELMTPDGQLHIEYQGITFHSAEEIREWAKRFIEKHSRFHLEIKSIEVRGDTATVHVTAHFTDDDTPTDVTIHITEHHHFKDGKLKETHVRSDTQQN

SEQ ID NO: 364 - protein, 122 aa, synthetic construct
MSEEEIRQWVRRAVEAFNRKDFDALKEIYDDDWQFHYAGEQRTFHDIEEFLDWLRKFFSEFSEVHMEIKDLHIDGDTVTVHITVHVHHEEEPKTTTIHQTEHHHFRNGKITETEVHFDEQET

SEQ ID NO: 365 - protein, 122 aa, synthetic construct
MSQEQAEEIVRRLLEALDKGDFEALKEIYDEDAQFHFAARGETLHDLDEFIEWVRRVKSQFSRTAHTPESIEVNGNTVTVHVHAQFHHSEEPKTVDVTMTRHFRFRNGKLVEDRVQMHEQPT

SEQ ID NO: 366 - protein, 118 aa, synthetic construct
PSEEEIKEWKKQFVEAFDNGDMDALARLMHPDATLDVSNGEQLTTLEEIREWFERFFKTFTSQHTEIEIHFHDDGRVTVHLHVHFTQNGKNITIDVTVHDRYEGKKLTESRFHFHQRD

SEQ ID NO: 367 - protein, 118 aa, synthetic construct
ASEEEIRELLKRFYEAIDKGDVDAIMRILHPDATFHDSNGETLTTKEELKEWFRRFFESTGMQRTKLEIHIDDNGTATVHVTITTTHNGQTFHIDFTEHHRFKDKKIVETRQHSHQKD

SEQ ID NO: 368 - protein, 118 aa, synthetic construct
MSEEQLREFKKRFMEAFQRGDLDALAELVHDDATFTDQQTNTTFTSKEEFKKWVEEFLKNSEFRVEIHSIEIRGDTVTVHFTVHVTHGDEHRTIRFTTHDRYTDNKLTETHFHFDNGG

SEQ ID NO: 369 - protein, 118 aa, synthetic construct
PSEEELRELAKRFYEALNKGDLDALAELYSDDATLHAQQDNITFTTKDEMKEWFKKFMESVDFRIEVKEIEARGDTVTVHVTIHFTHGDKHQTIQFTHHWHFSDGKIKETQESVDTGG

SEQ ID NO: 370 - protein, 119 aa, synthetic construct
TDEEQIREFLKRFYRAFAEERDANTVASLLDEDSTFHVQNGITFNNQDSIREWFERLIKSVERFRVEIKSIEVRGDTATVHVTIEMHHGDETVTVHVTHHWRFKDGRVVEVHVSTDERR

SEQ ID NO: 371 - protein, 119 aa, synthetic construct
ANREEIERLKKKAIEAFWRHKDANIFADLMTDDVTFHISNGTTLTTREEVVEWFQRWAETNQRFHIEIKEQHIHGNHATTHVEIHVTRGDQDYTIHVTQHDRYKDGKVTESHIHIDERE

SEQ ID NO: 372 - protein, 118 aa, synthetic construct
MSEEQIREFLRRMYEAMDKGDLDALRELVHPDATFHFDSGETYNDREEFIEWVRRWQSQFPDVRRQIHSIHIDGDTATVHVTLHVNTPGKTKTVTATHTWRFRDDKIVEVHFHSDDQK

SEQ ID NO: 373 - protein, 118 aa, synthetic construct
PSQEEIEELVKRLAEAFDKGDAEAVRRLLHPDVTIHFSDGETLTSWEDIKRFVEKFKSQFPDVKRDIESIEVNGDTVTVHWTLHVNTKDSTITNTGTTHIRFKDKRITEIRFHVDKQN

SEQ ID NO: 374 - protein, 119 aa, synthetic construct
PSREQIEELLRRFYESLDKKDADAIKELFHPGATIHFSDGVTLTDPDEIKEWFAKWLSKFPDSRHEMKSVEFHGDEVTVHVQVHLRDDSRDQTIDVTHHWRFTDNKITRLEARFDRKTS

SEQ ID NO: 375 - protein, 119 aa, synthetic construct
ASEEEIRQWKRRWVEAFNNNDLDELKSLWHPGATMHISRGITVTDLEEFREWYERFAKQFPDFHIEIKSLEVRGDTATVHLTLTLNHDNQTIHVHFRVHDRYTDKRLTESHFHYDEQRT

SEQ ID NO: 376 - protein, 119 aa, synthetic construct
MDESELREIDKRRIEAWNNRDPDKLKEHFHPGATVHFSEGVTLTDRDEIKRFFATLLERFKDSRIQIDEQHFDGDTVEVHMTLHFTHDNQTITVHATYHVHYKNKRLVRMQVHRDNRTS

SEQ ID NO: 377 - protein, 120 aa, synthetic construct
DDESQIRELVKRFYEAFQKGDLDALSEIVHDDAQMHISQENTTFNNKDEIRKWLERVLRELKDVRVEIKSIEIRGDTVTVHVQFHVTHGDETVTVDVTDHYRFKDGKIVELRSHVNQRRG

SEQ ID NO: 378 - protein, 120 aa, synthetic construct
DDEEEIKETKKRAIDAIQRGDWEALRKLIHPDARFHFASEQITFTTLDEFIEWFRQWFSSVKDVRAEIKEIRIDGDTATVHVQFHVNHGDKTTTIDATFHDRYKDGKLVESQVHFDQKDD

SEQ ID NO: 379 - protein, 120 aa, synthetic construct
DDESQLRELVKRFYEALEKGDLDKLSKLVHDDATFHFSSEQITLTTKEEFQEWVERWIKRFKDFRFEIKEIRVHGDTVTVHVQVHFHHGDETVTVDITDHYTFKDGKIVEVRSHVDEKSG

SEQ ID NO: 380 - protein, 120 aa, synthetic construct
DDESQIRELVKRFYEAFAKGDMDKLRELIHDDATMHLSQKQITAKTKEEILKLLEELIRSLKDFRVEIKSIEVRGDTVTVHVQFHVTHNTKDVTIDVTDHYRFKDGKITELRSHSDTKTD

SEQ ID NO: 381 - protein, 120 aa, synthetic construct
SVSEEQIREFVKALMEAFDKNDWERLARLMHPDATFHHSDQTYPLSKEEIEEWIKRFLKSIKDSHHQIESLEVRGDTVHIHWTVELHDDSRTVTVHATTTIHFKGDKVTEIRTHYDEQPT

SEQ ID NO: 382 - protein, 117 aa, synthetic construct
PDEEKIEEILRRFYEALDKGDWEKLADLLSDDWKYTNGNETRPGDRDEFIEWVKRFKSQFPDVKRDIRRIEIRGDTVTVHVTIHVNHKDKTKTVHVTDTHHFEGDRIRETHGQTDNQ

SEQ ID NO: 383 - protein, 117 aa, synthetic construct
PDEEDIKQILKRFYDAMDSGDAEAAASLFSDDVTFYNGNQTFNLGKEEFKEWVERWFSQFQDTHREIKSIHIDGDTVTVEYTVHFNHKDETQTYRYQDHFRFEGKKIKEVRSRRDEQ

SEQ ID NO: 384 - protein, 121 aa, synthetic construct
MSIEQFVRQWFEAFDKGDVDALLSLYHEGVQIHVTHSSGNTITFDDKDEFREWYTQWIQRWDDMSRQIESIEVRGDTVTVHATVHMTHKTGQRYTVHVTAHFHFRNGKLVEQRTTFDEKKT

SEQ ID NO: 385 - protein, 124 aa, synthetic construct
PSQEEIKEIVIRMIEAVWKTGDWRIIERYYHPGATVHVHHSDGTTITFTDLEELLEWWERMMRSLKRVHVHIDSVEVRGKTVTVHVTIHVHQGDQTFTFHVTSTFHFDDNGKITSEEVHINQQD

SEQ ID NO: 386 - protein, 118 aa, synthetic construct
TSEEEIRELLKRFYEAWDKGDWETLVSLLDDDATYHHSNGQTFHNAEEFTEWYKQMMSNMEIHREIHSIEIDGDRATVHFTVHVTHDNEDRTIQGTEHHQFKDGKIVETHVHLDTKNG

SEQ ID NO: 387 - protein, 116 aa, synthetic construct
PGEETIKELVKRFYEAVDNGDWDAVAKLLTDDATFQVAKEGRQFNDKEEIKEWFRKYWENYDVQRHIHKIDIDGDTVTVHYTVHRTHNGETQTYTATDHFRFRNGKITRVTSHITG

SEQ ID NO: 388 - protein, 121 aa, synthetic construct
ASEEDQEQAKQMIDTYYEAINTGNAEEAVRKLFDDDATMHNDGQQFNDKDEMIEYIKSIGEVHIEIKEIRITVNPDGTYTVTVHVTFHHGDNTVRVTHHWFLEKENGSWKIKELREHRDQE

SEQ ID NO: 389 - protein, 124 aa, synthetic construct
SEDEEAAREVVRQYFEALNHNDVDALASLYHDDATMHISEGRTFTTREEIKRWYERFLKESDIRLEVKEIEIRIHDNGEITVHVHVQVTHRETGRTVTVTFTFFLVKIGNRWYIKEVRAHFHQN

SEQ ID NO: 390 - protein, 123 aa, synthetic construct
PSDEEAIRELKKRFIEAFDKGDLDAIAELLHPDATMHIQNGRTFTTLEEIKEWFKRLMDNMTTAHQIDSIEIRHNDDGSITVTVHVTVTFPETGTTVRVTFHDFYDKRGFKIVETHITWDQNE

SEQ ID NO: 391 - protein, 123 aa, synthetic construct
PSDEEVIRDWYRQEAEALNNRDVDTWASLFHDDATVHFSNGQTFTTKEEYKEWARELLEKFDFRIQIDSLEVRTHDDGSITVTVHMTVTYNKTGTTYHFTYHDHFDKRGFKLVERHEQVHQRN

SEQ ID NO: 392 - protein, 123 aa, synthetic construct
MSDEEVIRDLKRRFVEAFNHGDADTMASLFAPDATMHIQNGITFTTREEIREWIEKLLKRFDARMQLDSIEIRFYSNGTVEVTVHVTVTRNETGIDYTFTFHDHYDRSSFQIKRTQVTWRQHD

SEQ ID NO: 393 - protein, 117 aa, synthetic construct
PFEEQIKEFKKRFIEAFNKGDWKALLDMIHDDARFHFSQENVTFTTKDEFREWFERFISNSDVKIDLKEIHIDGQTATVHFTMHVNHDSRTFTFEVTVHDRYKDGKLVESQFHIDEK

SEQ ID NO: 394 - protein, 120 aa, synthetic construct
PTEEKIRELVKRFFEAMDKGDMDALKSLLHPGATMHIDEGSTAHDLEEIKEYIARWLSDFRDIRRHLESIEIRGDTVHVHWTATFHHKTGNTYEFRGTTTFHMRGDKIAEIRFHTNQQPT

SEQ ID NO: 395 - protein, 120 aa, synthetic construct
DQEEIIRQLLRRFFEAINHGDMDTIESLMAPDWTFHYFSGQTFTSKDEFKEWFRRFFESFKDMRIEIKSMEINGDTVTVHVEVHVTHPTGKKITYHVTEHHHFRGNRIVHTQVHERQQET

SEQ ID NO: 396 - protein, 127 aa, synthetic construct
MSEEEAREAVKEMLRRYYTAWNNNDMDKLEELITPDARFQDARTGREFDLEEWKEMLERLYKTFPGVQIQIDEIRIEIKDGTITVEVHVTMHYQSKKQTTHYTHFWHIELTDGGWRITRVTVQSDSG

SEQ ID NO: 397 - protein, 127 aa, synthetic construct
PSEEEVREAVKELIRRFIEAINKGDLDALFELYHPDARLHISETGTTYTREEIKEWFKRWFETFPDTQVELKSVEIHVKDGTGTVTIHVEVTYRRDPKTVKFDSHIRIVYTDGTFKIVEEHIHTDSG

SEQ ID NO: 398 - protein, 127 aa, synthetic construct
ASEQELKEQIKEIKKRFAEALDNGDWDTVRKLFHPDATLHISDGRTFHSLESIVRYIQELASSNLTSRHEIKSMEIEVKSKDHVEVHVHVQVHYDQQPRTVHITFTDVYRYTDGGMKIVETRVHTDH

SEQ ID NO: 399 - protein, 127 aa, synthetic construct
MSEEEIEREIRETLKRYFEAINKNDVDKLFSLLDEDWTYHHSSGETITTREEFVRLFRQLATRNNDTRIQIDSMEVRIDSPDHVTVHVHVTMTNKYEKRTYHVTETHHFRRTDGGFKIVETRAHFDH

SEQ ID NO: 400 - protein, 127 aa, synthetic construct
MSEEELEEAARQIVRRYIEAINRNDLDAIASLYHDDARVHYWNGQTFTTREEIKEWFERQIKSGAQVHLQITDMEIRIVSKDRVTVHVHVQIHYEQNPRTYRVTSTFHIVLTDGQWYIIEERIHLDH

SEQ ID NO: 401 - protein, 127 aa, synthetic construct
ASEKEAEEAAREVIRRYVRAINQKDLDTLKELYAPDATMHHANGRTFTTLEEIIDFFKKQIDNNNDTKVEIKSLEVRVRSKDTITVTVNMDLTNKLNKHTIHVQSHFHMERTQDDFKIKEEHVHIDH

SEQ ID NO: 402 - protein, 127 aa, synthetic construct
TSEEEAEEAIRRLLREYYRAIDQGDWETLAKLFHDDATYHHANGQTFNSKEEIIRFFKSLFDSGLRTEHQIDSIEVEQKSKDEWTVTVHVTVHIDKESSTYRVTEHHHFRQTDGDFKIVETRVHIDH

SEQ ID NO: 403 - protein, 127 aa, synthetic construct
PSEKEIEEQVREVIRRYFEAWNNNDFDTLHKLLHDDWTYHHSSGETITNREEFIKRIRELIKNGFQIQLEVKSLEIRVESKDTVTVHVHVTLHFEKHPRTVHVTETHHLRLTDGGWKIVETRAHFDH

SEQ ID NO: 404 - protein, 127 aa, synthetic construct
MSEEEIKEAAKEVIRRWIEALNKKDLDTLRELYHPGATMHQSNGQTFHDVEEIRKWFEEFMKKFDFQLHLTGIEIEVKDGRTVTVHVHIQFTDSKTGTTVSVTSTFHLEVKNGQLYITEQRNHRHQT

SEQ ID NO: 405 - protein, 118 aa, synthetic construct
TSEEEIREVLKRFYEAFQEGDVEKLLRLMHPDAQMHVSEGITFNNWEEIKEWLERFFKRFGDMRVEIEEIRISNGTVTVHVTFHFNHKDGTVTIRVTDHYHFKDGKITRIESHHHPQD

SEQ ID NO: 406 - protein, 130 aa, synthetic construct
PKEEKLIEIAKEIIRRFYEAFNRHDFDEIIELLHPDWTYHHSSGRTFTDPEEVKEWIRRFLSNDNTHIEIKSIEFRTGGDTITVHVHGTLHEHRKDHTQTTHFTETHHFQQSGNDVKLVETRTHWNSDGS

SEQ ID NO: 407 - protein, 125 aa, synthetic construct
PKEKEMEEAVREFLQREFEALDNKDWEAWAKLLDDSTIHFADSNTTFTSKDEITEFFRQSLEQFDSEHRVKSMHIEIDGDTATVEVHVEVHFKGEGQTFRFTATFHFTFENGELKLKEKQIHTDT

SEQ ID NO: 408 - protein, 125 aa, synthetic construct
PKEKEMEEKVREIKKQLIEALNKNDWDTFKKLMDDSTMHNPDRGRTFTSPDEIAEWFRRFVETFDVTIEIKSIEIRISGDTVTVHVTVQVHFKGEGQTYTFHFTDHYEVKDGEIKLKSSTIQTQD

SEQ ID NO: 409 - protein, 125 aa, synthetic construct
PKEEEAREQAKEWLKEFYRAINENDMDALKRLMDDATMHIAQFQITFTTPDEIKKWFEEFIKKFRHRVEVKEIRIEVRGDTVTVQVHVQVHFEGSGQTFRFTDTYHFEVQDGQMKIKELRSQIHS

SEQ ID NO: 410 - protein, 129 aa, synthetic construct
PSEEDEEDIRQLIERFYKAFNEGDLDALLSLLHDDWTFHEYNGRTLTTREEFKEWVKQWLSNSARIHITEIHIENKDGDTATVEVHVTVHFNTNNKTKTVHTRDTHHFVRINGQWYIVETRVQVDETGD

SEQ ID NO: 411 - protein, 129 aa, synthetic construct
PSKKQQEDIRDIIRRFAEALNKGDLDALESIYHPHAQMHIYRGITMNSREEIKRWFKEWLSQPFRIHVHSIEIEDKDGDTITAHAEMTVTFTDNGKQKDVTVRRTFHFTLINGRWFLIEDHEHVDNTGT

SEQ ID NO: 412 - protein, 129 aa, synthetic construct
ASKEQQEKIKEIKQRFFEALDNGDWETLAKLVHDDAQFHFAKGETLTSKEEFKEWVKRFASTPTAHHITEIHIENKHGSEIEVTAHVTFHVTHDGRDLTFHVTTHDRYVEENGELKILETRFNFDDTGD

SEQ ID NO: 413 - protein, 128 aa, synthetic construct
PSEEAKEAIKELIRRWVEALNNNDRDTLRDLYHDDAQYHDASGQTFDDREEYVQWMTEWFQKFNVKVTILSMEIRKDSEHQYTVHVTFQFHRHTPSSTHTVNVHSTFRVERHGDEWRIVEQHVQRDST

SEQ ID NO: 414 - protein, 126 aa, synthetic construct
DKREEMEERIRQLKRQLIEAMNNGDADTFISLFHPDATYHHQSGRTFTTKDELKKWFEEFWKKHPTKLENQSMEIQITSEGRATVTVHIQATDDNTGKTVTFTYHDFYQFFGDELYVVRVETQTDE

SEQ ID NO: 415 - protein, 126 aa, synthetic construct
DERKKAEELIRETKRRFVEAVNNKDVDAIASLFHPDATMHHSSGRTFTTLEEIKDWVEKFLKTFDVHLNVDSIEFQPTTPGRMTVTVHITVTDNDTKTTVHITFTDFYQFDGDTVKIVRTEIYVHE

SEQ ID NO: 416 - protein, 129 aa, synthetic construct
MSEEEAREAIKEIIRREVEAFNKRDLDAWASLFAPGATIHFANGQTLTDLEEIKEWFKRFLDHFPSRMEVKSLEIRIVDSTTVQVHVTLEVHVHHDNETKTFTVHATDRFELDDTGFKIVERHVHMEEQ

SEQ ID NO: 417 - protein, 118 aa, synthetic construct
TSEEQIKQWVRRYLEALDRHDIDELAELFSKDWTYHNSRGITFSTLEEFIEWVERWLSQAEDSRHELKSLEIHGDTVTVHVTQHLRHGDKHKTIDITEHHTFKNGRLVRTQTHFDEKD

SEQ ID NO: 418 - protein, 129 aa, synthetic construct
SSEEKIKEDIKEMLKREFEAIDNHDWEAWKSLFHPDAKQTNSDEKRTYDLEEIVEMIRRWLSTAPDSRHDLHTIHIEIRGDQVHVTVHVHVTVHRNGKQYHQTVTQHVVFRRSNSEWKIISKHVTTRQE

SEQ ID NO: 419 - protein, 125 aa, synthetic construct
SSEKENKDAVEEIKRQILDAINKGDRDLFKELFHPDATMHISNGRTFNNLEEILEWFKQMTENNFHFELKSFRIEVHGDTVHATFHVDVTERQTNRTFHVQFHDTYVVFNGSWKIVHTQIHYDNS

SEQ ID NO: 420 - protein, 125 aa, synthetic construct
MSEEEAQEAIRQWKERFVEAINRGDMDALREMVHPDATFHFSDGRTFTNIEEVVEWFKQMFENGIELEIKSIEIHTDGDEYRVTVHITLTERSNNKTVTVTFHDRYRLENGSFKLHESQIHYNKD

SEQ ID NO: 421 - protein, 125 aa, synthetic construct
TSEEEAKEDIKEWFRRFYEAFNKGDWHKLKSFYHPDATMHLSDGRTFTNRDEIVEWFRRLWSNGVTTHIHSIEVEIRGDQVHVTVHVTLTEHTNNKTVRVTQHVTFDLENGSWKLKRDEIRHDKS

SEQ ID NO: 422 - protein, 125 aa, synthetic construct
TSEKEIEEAIREFLRRFYEAFNKGDMDALKSFYAPDATFHVSNGRTFHNPDEIKEWFKKLFDQNVEMEVKSVRIEVRGDTATVTVHFHLTNRTNRQTITITQHFHFRFENGELKLKRDEIRIDNS

SEQ ID NO: 423 - protein, 124 aa, synthetic construct
MSEEEMKEAIKELKRRLVEAMNKNDADKLKEIFHDDATFHGDGRTLKNKEEIAEWFARFISTFRFKIQIDDMHIQFGDGEVTVTVHMTVTFDDTGRNVSVTAHDRYRFTKDDVRIVSTEFRFTN

SEQ ID NO: 424 - protein, 124 aa, synthetic construct
PSEEDEKQIRELIERFYEALNKGDAELIARLLHDDAQLTVNGRTFNSKEEVKEWVKRFFSHSTHIQVESIEITYDKDHITVTVHVTMHDNQTGKTYHVTDHYFFRKTKDGWKIIRVQSHTQQQD

SEQ ID NO: 425 - protein, 126 aa, synthetic construct
PSDEEEIREWLKEFYEAFNQGDLDKMAELVSPDATMHVYNGQTFNSLEEIKEYLERVFKTFPTMQIHVRIVRIEIRGDHATVEVEVTAHVTHDGRHTTYHVREEHHFRKTKDGWKLTETHIHRNQD

SEQ ID NO: 426 - protein, 126 aa, synthetic construct
PSDEEQIREWKKRFIEAFNKKDLDKLRELVHPDATMHVSEGITFTTLEEIVEWLERFFRRFKDVKVSVQIDEIQIHGDHITVHVTVHVTFNHDGEQKHVTVHATDHYRKTKDGWKLVRSQFNWHQQ

SEQ ID NO: 427 - protein, 128 aa, synthetic construct
SDKEAEEKIREWKKRFIEAFNHKDLDKLRSLLHPDVKYHDTEPQTFDYEELVERIEEFLKKIDVRIEIKSIEIEIHPNGHTYHVTVHITVHMNRGDRTQTYHVTQHDRYELRNGQFYLAETETRTNGG

SEQ ID NO: 428 - protein, 127 aa, synthetic construct
PKEEKARQQIREFVERLYDLMNKGDADAVASLYTDDATFHFSDTQRTYSKEEFKRMVEKMFRAGVQFHVKSIEIQFDPNDNHVTVHVHVDVTNESTGQTYTFTQTFFFRFEGDELKLTEDRFHLDNS

SEQ ID NO: 429 - protein, 126 aa, synthetic construct
PSDEEAVREMVRRYVEAMNNNDLDKIKSLYDDDSKYHDASQQRTFDAEELKEWYERFISHFDFRIEIKSIEVRVDDEHTITVHVNLHVTVTHNGETRHHTATYTFFLEKHNGSWKIVEVREHRDDE

SEQ ID NO: 430 - protein, 127 aa, synthetic construct
DDEEMKEQIKEWLKREMEAWDRGDVDAWAELVSDDAEFHENDTNRTFDKEEVRERIERFVRNNIDAQRQIDSLEIQIHGRTHATVHVHVTIHEQGDNKTRHFTTTDHFEFEDNGVKLKERRTTTYHD

SEQ ID NO: 431 - protein, 127 aa, synthetic construct
DDKELEDQIREWLRQYFEAFDSGDIDKLRELVTDDATFHNTSTNQTYNKEQFIEMVERFIRSGIDSSHEIHSIEIRINGTEHVTVHVHWTLHRRGGNRTFHGTTTFFFRFEPNGMKITRVQTTTQPD

SEQ ID NO: 432 - protein, 127 aa, synthetic construct
PDEEMQEAAKQWIERFYDALNKNDLETLYSLFDEDWRYHETDTNQTYDLDQWKEMVERLIKSGIRFRVEIDEIRFETKGHTHLRATVHVTVQTEGGDTRQRFRDTHTFRQEKDGWKVVRTQTTTYHE

SEQ ID NO: 433 - protein, 127 aa, synthetic construct
PDEEMEEEVRRLVRRYYEAIDSGNLEEVYELLHDDWTYHDASRNQTYDRDQFKDMVRKFLENDLKVQRHLKSIEVRINGTTEVTVHVHVEVHRSRGNTTYNVTDTHHFRRYKDGMKFVETRTHTQPT

SEQ ID NO: 434 - protein, 127 aa, synthetic construct
PDKEFEEQIREWIQREFEAWDSGDLETWASLYHDDSTYHNTNHQQDYNKEQLKEMLERFFKAGNEAHREIKSIEIQKYGTHTFRATVHVTAQHNGGNQKVNFTYHFFFRFEKDGMKLVEKRETTQPS

SEQ ID NO: 435 - protein, 125 aa, synthetic construct
PEDEEAIKQFLKRYYEALNRGDMDTIRKLVDDDSTFHDATRNQTYDWEEWLEMLKKQTDNDTKFEIKSIEVETKSSNTITVHSHVQVHTTHNGQPYTFQVTETHHFTLEGDSWKLTETHTHSDSS

SEQ ID NO: 436 - protein, 125 aa, synthetic construct
PEDEEAIRQIVKRYFEAVDKGDADAVFSLYDEDARWHDSTTGRTFNAEELRERYRKLAERDSRHDIKSMEIRVVDSTTITVTVHVQVTFNQDGQSRTYSVTYHFHITKHGDSWKIVEVHTTRDSS

SEQ ID NO: 437 - protein, 125 aa, synthetic construct
PKFEEAIKRWLERYYTALNNGDADTVAELLTEDWRYYDSSRNQTYSRDQFKKMVEELLSHDTKHEIKSLEIRVNSKDTATAHVEVQVHRTHNGQQHTFDTHDTHHFEFRGDRIYITHTHFHMDSH

SEQ ID NO: 438 - protein, 125 aa, synthetic construct
PEMEEQIRQIVKRLYDAMDNGDADAVKSYYSDDSRFTDENHQRTYSAEEFKEMVKQQASNDVRREIKSIEVRINDSRSITVHVTFQLHENHNGQTRTITFHQTLHFVLIGDQWYIKHDHTQTDDS

SEQ ID NO: 439 - protein, 129 aa, synthetic construct
VDEEDAKEIKEIIERLVEAFNKGDMKTFRDLFHPDWTYYQSDGSTEYDLDQFIEWLERLLSQGVRVEIERIQFDSQDGDTVHVTVHVTYHVTRNGNTRTIHATEHHVFTRFGDEWKIVRTQVHHDERQQ

SEQ ID NO: 440 - protein, 129 aa, synthetic construct
SPDEDQEQIKEVLRRFYEAWNKGDRDKLRELLDDDWRYHDSNGRQTYNKEEFLEMVEKALSRGFKLEVKRIQIDDQKGNTIHVTVEVHMTWTHNGRRFEATVRDHHTFVKKGDSWKMVRTQSHWDNHET

SEQ ID NO: 441 - protein, 128 aa, synthetic construct
PEEEDKEKIKEWYKREIEALNGRDLDAWKELVHPDATFHDASRQQTYDVEEVRKMIEELQSHGFRIELKSMEIRFDGDHVTVHAHFTVHFTHGDRHVTTHYTVTDHFQKKDGELKLIERQEHHDTQED

SEQ ID NO: 442 - protein, 130 aa, synthetic construct
MSEKELEEQIRDFVRRLVEAFNKGDLDALERLYHDDATITFASTGQTYSKEEFKRWVEEWWKSVKGAQVQIDSIEVRVHDDGSVTATVHVTVHQRHGDRTHTFTVTSHFHFRFEGDQLYLIEEHVHIHHQ

SEQ ID NO: 443 - protein, 130 aa, synthetic construct
SSEKEAEEAARELIRQYYEAVDKGDWEAVKRLFHPDATFHDESRQQTFNLEEFLKMLREWWESVKGVQHDIHSIEIQFHDDGSVTVHVHGTVHVTQGNRTKTYHFTDTYHFRLEGNRWKIVEYRSRRHQA

SEQ ID NO: 444 - protein, 130 aa, synthetic construct
PSEQEAEEAIREWLRRYYEALDNGDWEALKRMFHPDWTYHNSDTGQTYDLDEFIEMVRQTLRRIQDSRHQIDSIRFEFDDSGQVTVEVHVTVHFNRGDQTHTYHITEEHHFRYEGNDFKIVETHVTTHQS

SEQ ID NO: 445 - protein, 130 aa, synthetic construct
MSEKEMEEAAREIIRRLAEALNNGDFDTIKELYHPDATITFPSTGSTVDQDQFLRWVREMMERMKGFQIKIDSIEFEFKKDGELTVTVHVTVTVHQGNQTYTFHVTSHIHIRFEGDTVKIVREHITTHQS

SEQ ID NO: 446 - protein, 129 aa, synthetic construct
NSEEELKEQIKEFIKREMEAIDKGDADAWLSLFDEDVTITQNGNTRPMHAEEFKEMIEQIASNNSNHHVDSIEIQIRGTDEVTVTVHFTVHFTHNGKNVTIHITAHFHFQVRNGDLKVKSKEEHTDNRP

SEQ ID NO: 447 - protein, 129 aa, synthetic construct
MSEEEMKEAIKQWVREYFEAFQNNDWDKMLKLFTDDWTFTQDGQKQDRTPDEIREWVEEQFKNDAKVEIKSIEIQIEGTTHATVHVHVTFHHTHNGQQVTIDVTETHHFQFENGSVKLVHTRQHRDNKE

SEQ ID NO: 448 - protein, 129 aa, synthetic construct
MSEEEMKEAAKQVIEQYYEAFQKNDLDKLKSYITDDWTYTNNGQTENRSPEEFKEFVEQQLSQNTTVEIKSIEFRIVGTTHITVHVHVTYHTTKNGETRTFDVTDTHFFQFENGSVKIVHTETRTDNKE

SEQ ID NO: 449 - protein, 129 aa, synthetic construct
MSEKEIEEQAREIIKRFYEAIDKGDADAVASLYSDDSTFTHSGNTKDVSKDEIKEWVKKFASNNSQHHIKEIHFQVVGKDSVTVTVHVEIRMHHNGQTKTVTVTQHFFFEFHNGSLRIKRDEEHRDEHS

SEQ ID NO: 450 - protein, 131 aa, synthetic construct
ASEEEARQDAIEILQRYYDALNKGDWEAVLRIVTDDWRYHENNGITLTTREQIRRWVEELFKKFNFQIQIDEIRAQIHDDGSATVTVHVTVTFHDGDKTVTTHTTDHHHFQLRDSRYQLIETHVHRDTKEN

SEQ ID NO: 451 - protein, 124 aa, synthetic construct
SGEETLREAAKELVRRLFEAFNTGDMDTLRSLYHPGARFDVDEGRTYDKEEYLEMVKKWNSQDWQLQIDSIEIRIIDSTHVTVTVHVTLHNRSTGTTIHITRHITVELRDTQVFVIRDEVHTNS

SEQ ID NO: 452 - protein, 124 aa, synthetic construct
MGEETLREAVKETIRRLAEAFNKGDLDKLRELYHPDATFHHYSGETYDLEEFLKMVEEWNSNDWHVEIKSIHIQIVDETTVTVTVHFTFTQPKTGRTQHFTSHFHIRFEDSELKITEEHIQEHS

SEQ ID NO: 453 - protein, 124 aa, synthetic construct
AGEETLEKQARELVQRLVELMNNGDLDALRELFHPDWTYHTNNGETYSLEEFLEMVEELFRQQWRLQVDSLEVRINDENSVTVHVHVTFTQEQTGRTRHVTETHHFRYKDSTLKLTRTHAHRNS

SEQ ID NO: 454 - protein, 124 aa, synthetic construct
NGEETARRAAEEVVRRFYEAINKGDLDEIRELLHPGWRFHQDQGTTYSIEEFLEMVKELFDQDWRLQIDSIEFRIVDENEITVTVHVTMTNRSTKETRHVTDHHTIRFQSSEWKIVTTHTHTNS

SEQ ID NO: 455 - protein, 127 aa, synthetic construct
SDSSELQEAVRQVVKRMIEAINKGDRDTLRELYHPDARMHHANGQTFDYEEIIQFMAKLASADIKIDVESIEIKETKSNGEVTVEVHYTVRNKRTKQDVTVTRHFRFQQQPDGSFKLIEDRVQHDDR

SEQ ID NO: 456 - protein, 127 aa, synthetic construct
PDPSEIEEKIKQWLRRMYEAINKGDIDTLRELFDDDWTYHQQNGQTYDKEEFLKMMEELFRRNVRIEIKSIEIKEFDSRGEATVEVHVQFHNASTGTTVTVTETHRFRFEPNGQIKLVETHQHRDSN

SEQ ID NO: 457 - protein, 125 aa, synthetic construct
TSDEAEEEIREFDRRRFESFDRGDADAVFELVHPGAQFTDEREQRTYDQEEFKEWVKRVASNNVRHEIKSVEVQQTGENEFTVTAHVTVHNNSTGTTVDVTYTLHYRRQGDRWYLVRVREYWHQR

SEQ ID NO: 458 - protein, 125 aa, synthetic construct
TSDEIKQAVEEWLKRWFEAFNRGDVDAVASLYHPGATMHLGPTSRDYDYEEIKRFIKEWLDQDWKLEIKRIEIQQVDKDEVTVTVHFQATNKSTGTTVDVTRHLTFRRYGDDWKLVEDRADFRQS

SEQ ID NO: 459 - protein, 126 aa, synthetic construct
PEEKEAREIVKEIIEREVEAFNKGDMDAWKSLFAPGATFHHSNGTTYDLDEVKKMLEERWRAGVHIEIKSIEIRVKDGETMHVTVHLQMHDRRTGQTFDMTSHIRLERTQDDIKIVEKHSHTDSGS

SEQ ID NO: 460 - protein, 124 aa, synthetic construct
DDKTAEEIIREVVERYIDAFNKGDWKTALELLDDDWQFHHSSGQTIHTKEEFREWFEKLASDAKIEIKSIRVEKKDSNTYTVEVHVTVTHDSTGQTFTVTEEHHLRREGDDFKIVETRVHVNPN

SEQ ID NO: 461 - protein, 124 aa, synthetic construct
DEKTQEEQIRQIIREFYDALNKGDADAVMSLFHPDATMHIWNGQTFKTREEIKEWIEKWASNYKIHIKEIRIQFEDHNRITVEVHFTATNDSTGTDIDFTETHHLELHGDDWYIIETRTTSHQQ

SEQ ID NO: 462 - protein, 124 aa, synthetic construct
DEDTAREAIKETKKQFVEAFNKGDADRLLELLHPDATVHISNGETITTMEEFKEWVERLASYVEIHLKSVEIEQKDHNEFEVHAHMTFTDKRTKQTYHVTATDRYRFSGDSVKIIESRFHFHQT

SEQ ID NO: 463 - protein, 123 aa, synthetic construct
PSAEEIIRDLVRRLVEAIDNGDWEALSELYAPDARFTEGPKKQPLDREEFRKWVEEFSKHPSTREIKEIRIQQHGTHTYTVHVHVQLHDQSTGRTFDGTSQLFIVRKDGSWKFKREQDDFTNS

SEQ ID NO: 464 - protein, 123 aa, synthetic construct
PSMEEAVRDWLRRYFEALNNNDLDALEELFDDDWRFHLAETQKTFDKEEFKEWARTLMSFKSQVQIDEIRIQIYGETEATVEVHVTITRDDTNQTTKFTEEHHFRRKDGSYKLVETHVQRDQA

SEQ ID NO: 465 - protein, 117 aa, synthetic construct
DNSEIEDWIRKYFAAINHNDLDAIASLYTDDSTYYDAQPRTFHDKEEIKRWYEEFMKRFKDVRFEIKEIRVHGQTVTVHVEVHATHGDRDYTFKVTSHFVFKDGKLKEVRDHMQSTD

SEQ ID NO: 466 - protein, 120 aa, synthetic construct
PASSEEIKDWIKKYYEAYNNKDVDALVELVDDNAQIHDQHGETLTDKEEFREWVEKWLKEVKDVKFQIDSIDTTDSTVEVHSTVHTTQDGKTVTIHVTETHHFRNGKLTSTHIHSDPDDG

SEQ ID NO: 467 - protein, 121 aa, synthetic construct
PSQEEIKELDERRIEAFLKQQDADTLAKLMTPDSTFHTYNGETLNDQEEIKKWFKRYFEENFDEMHFQIDHMHIEPNHITVHVTVTFTRNGQTYHMRVTYTLTYRDNRLAHMRIHVDTKHS

SEQ ID NO: 468 - protein, 120 aa, synthetic construct
PSEEEIREIVKRLMEAFDKGDADAVMSYYHPDATMHVSDGVTFTDLEEIKRWIEQWFKSFDDVKRQIESIEIRGDTVHVHVTVHATQSNGKTITFHVTSTFHFNKDKRIVEERIHIDQRE

SEQ ID NO: 469 - protein, 117 aa, synthetic construct
MSEEEIRQFLRRFYEAFDKGDVDTFASLFHPGVTIHVWQGITFTSREELREWVERFLRNFKDMQREILSLEVRGDTVEVHVQVHTTHNGQKYTFDVTHHWHFRGHRVTEIRVHVNPT

SEQ ID NO: 470 - protein, 121 aa, synthetic construct
DSMEEIAKKVVERFAEAFNRKDLDAFAEIFHPGATVHFWEGVTITDQEELKKWFEEFMKRFKDVKVQIEHVDVDQDHVTVHWTMTVHHDDRTIQFHVTTHFRFKDGKLTEVRFHMDWQEHD

SEQ ID NO: 471 - protein, 118 aa, synthetic construct
TSKEEAKEILKRMYEEFAKERDYDKWVAYFHPDATMHIYQGTTFTTQDEIRKFLKEFLERFKDMKIQIERIEVENGRVTVHYTAHFTHGDETRTYRFTDHFVFKDGKITEERSQIDSL

SEQ ID NO: 472 - protein, 118 aa, synthetic construct
PSKEEIEEFLRRMFEYWAKTGDVDAYMSLFHPDATFHISDGETFTTPEEVKRWFREFLKHAKDVKIQIERIEIENGRATVHWTMHVTHGDQTHTVRVTTHFQFKDGRITEVHIHRDDT

SEQ ID NO: 473 - protein, 118 aa, synthetic construct
PSKEEIKEFLKRWFEYFNKTGDADAAASLLHDDVTVHLSNGTTFTDKEEIKEWLRRWLKSAKDVHIQIERIEVQDGRATVHWTVHTTHGDQKYTFRATTHFVFKDGKIVEVRHHYDST

SEQ ID NO: 474 - protein, 118 aa, synthetic construct
PSKEELIQLVQRWYEEFFKTGDVDKASSFFHDDATIHNASGITFTTKEEFKKFMEEWFKKAEDVKIQIERIEVEGGTVTIHYTVTVTHGDETKHTRFTDHFRFENGKLTEVHSHYDDT

SEQ ID NO: 475 - protein, 119 aa, synthetic construct
DDREDIERLVRRFIEALNKKDLDTLADLFHDDATMHLYNGITFTDKEEIKQWFEEWMKRFKQVHIELKSMEFRGHTVHVEWTIHATHGDKDITFHAHTTFHVRGKKIIEMRIHVDTDNN

SEQ ID NO: 476 - protein, 118 aa, synthetic construct
PGEQAIKEWVERWVEAYNKRDADALASLYTDDVTFVHGDQPYQLSREQYKEWVERFLSHFKDSKLDLKSIHIDGDTVTVHMEMHVNTNSQTYTFEITVHLRFKDGKLKEQRDNTDSQS

SEQ ID NO: 477 - protein, 120 aa, synthetic construct
MSEEQAKELVKRFMEAVDTGDLDALKELFHDDATLHLSDGITFTTKEEIIEWFERWLSQLQDVKRQIESIHVTDDTVTVHWTMHVTHGDQDFTFHGTTHIRFKDGKIVEMREHVDQDDGG

SEQ ID NO: 478 - protein, 120 aa, synthetic construct
PSWEEIKEWVRRMVEEVFNTGDWEKAKSLLHPDWQFHHSSGTTFHNREEFVEWFQRFLKRFPDTRVDVSHIEITSEDVTVTFHFTFHARHGDQKFTYRVTEHHKFRDGKLVETRVHWHQT

SEQ ID NO: 479 - protein, 120 aa, synthetic construct
PEEEIREWKRRLFEALDHKDWEKLSELFKSSKDIKMTTQNGRTFDAEEIIEWFRRFVESFADMRHEIKQIDFEGDTVTFHVQVHFTRPDGSTKTIDFTFHDRYDKNGKIVSTNITWDEKD

SEQ ID NO: 480 - protein, 120 aa, synthetic construct
PEEQIREFVRRLIEAFNKHDIDKLKEIYDSSKDVKFHQDSGETYDKDEFLKQVKEILERWASVHIEIKRIEFDGDTVTVHVQVHLTRPDGQTHTFDVTSHFHFDKDGRVTSEEIRTRKVD

SEQ ID NO: 481 - protein, 120 aa, synthetic construct
PEEEIKEFFRRLLEALDKKDWEKLKEIYSESKDARITEDSGQTFDKDEFVKMLREFLERWAQTAHQIDRIEFHGDTVTFHVTVHLTHQNGQNVTTHVTSHLHFDKDGRLTHEQIHRDKRD

SEQ ID NO: 482 - protein, 124 aa, synthetic construct
PMSEEEIKQFVKRAYDALNNHDWETFASLFHPDARVEFNDGTTLTTLEEIKEFIKQLLEKLGRMHIKIDEVHIEKHGDTITVTVHVTVHVHTPDKEITFRATHHWHFTRGRLISLQEHMNQDNK

SEQ ID NO: 483 - protein, 118 aa, synthetic construct
PDEEEVRRWLREYYDAWNRNDLDALASLLSPDWTLHNGQQSREDFIKWVEEFLKRFKRMRVQIDEIRIERHGDEVHVTVHVTIHFTSSNSTDEVHTTDHHTFRNGKIVETRTHTDQRS

SEQ ID NO: 484 - protein, 118 aa, synthetic construct
PAEEEIRQWIRRYVEAWNNNDWETIVSLYAPDATFHFGGMSREEFERWVKEWLSRAKDIKIQIDSLEIRQHGDEYTVHVHMTMHITHDNKKTTFRFTSTFHFRNGRLKREHFHSSTES

SEQ ID NO: 485 - protein, 118 aa, synthetic construct
PDEERAKDWVRRFYEAFNQNDLDAILSLYSPDATFHMNGMSYEDFKRWVEEFLKKFKDVHVQIESIEIRVSGDTVTVTVHVTVHVTLTDGEVTFKATQHFHFKDGKLKEDEMHWRTES

SEQ ID NO: 486 - protein, 118 aa, synthetic construct
PAKEEVKEWLQRFYEAWDNNDADKLKSLVHPDATFHDGGYDYEQWKEMVEEWLSRVKQSSHHIKEVHIEIHGDEITVTVHVEVHLTHDDRTVTVDVTDHYRFRNGRLVEVRSHRRTHS

SEQ ID NO: 487 - protein, 120 aa, synthetic construct
MSEEEIREWVKRFFEAINKGDMDKLRELLDDDWRYHDTDRQQTYDRDEFLKMVEEFLKKFPGAQFEIKSIEIRGDTVHVHVQVHMTHDDGSTQTIDITETHHFDSDGKLQRTEVTSDPKD

SEQ ID NO: 488 - protein, 120 aa, synthetic construct
MSEEEIREIDKQRIEAINNGDMDKVKEIFHPDATFHFNDTQTTYNLEEFIEWVERFLRRFKDVQIEIKSMEVRGDTVTAHSEVHVTHPDGSTQTIRVTYTIHYDKDGKIKRMEINTDPKD

SEQ ID NO: 489 - protein, 120 aa, synthetic construct
PSREEIEQLDTERIEAFNKGDAEKLKELMHDDAQYHNNDEQQTYDKEEFIEWFEQFMKKFKGVRIQIEELHVHGNRVTAEGTVTFTHDDGSQTHIRFRYTVEYDHNGKIKRVEESTDPSD

SEQ ID NO: 490 - protein, 118 aa, synthetic construct
ASEEQIEDILRKMYEALNRNDLDAFLSFFHPDATFHVYQGITFTDLEEIKRFFKEFLERMKDVHIEVTRIEFHGDRVTVHYTVHVNHPGETKTYHATDHFQFKNGKLTEVRSTIRQED

SEQ ID NO: 491 - protein, 118 aa, synthetic construct
TSEEEIREWVKRWAEAFNNNDLDKLVSLFHPDAQIHFYNGQTANSLEEFKKYLERFFRHAKDVRFEIKNIEVHGDTVTVHWTITVNYPGKTVHFHGTTHFRFRNGKLTEVHFHVNQED

SEQ ID NO: 492 - protein, 118 aa, synthetic construct
PSEEEIKEFLKQLYETIDHRDADAFVSLFHPDATLHISEGITFTTLEEIKRWFEQWLDRVTDVRHDIKRIEIHGDTVTSHVQTHVTHPGQQTTINVTEHHRFENGKLVETHTHWNQER

SEQ ID NO: 493 - protein, 118 aa, synthetic construct
TSEEEIREIIKTFFEAVDRGDWKKIKDLYAPDATLHHSSGRTFHSLEEIVRWFQQVFSQLKNSSHQITGIEIRGDTATVHVEVHVNNDGRTITYRFTSHFHFSDGKIKEEHVHVHQEG

SEQ ID NO: 494 - protein, 124 aa, synthetic construct
PSEEEMERAVREVMKRYYRAINEGDLEALKELFHDDARFQSSPMNKEQFIEWVKKANEAGTQLHVHDMEVQIDGDEVTVHVNVTMTVTRGDETRHTTFHETHHLRFTDDGLKIISTRVHFQTHQ

SEQ ID NO: 495 - protein, 124 aa, synthetic construct
PSEEEQKREIKEFYKREAEAFNKGDLDAWDSLFDDDVKNSSNPADKEEIKEWIKKAFDNNTQMHITHMEIEVNGDTVTVHITVTVHTHRGDRTTTTDYHTTDELRIDSDGWKFVDRQTHFQTHH

SEQ ID NO: 496 - protein, 124 aa, synthetic construct
MSEEEIKRAVEEFVRREIEAINRGDLEAWKELVDDDARVESEPANKEQMAKRIEELFRAGTQIELKSIEIHVDGDTVTVHVHIQFHTHHGDRTTTVDVTATDVIEIDHDGFRIVSRRFQRHQHT

SEQ ID NO: 497 - protein, 126 aa, synthetic construct
SDSEDEEAAKEWVRRWAEAFQKGDLDTLSSLYHPGATIHHSDGETYDRDEYLDWLGKYHKKFDTSVTIHEIRVEINGDEIRVHVNMTLTHHHGDQTYHFRVTYTFRFEKKKDGLYLVEQHTHTDDT

SEQ ID NO: 498 - protein, 126 aa, synthetic construct
DSSEAQEEIKQWFRREFEAMDNKDRDTWASLFHPGSTVHHSNGQTYDREELIERFGSFQSRFDAKHEVKSIEIQQHGDHITVTVHVTVHLTHGDKDKTIDVTYHDRFRKTKDGWKLVERHVHTDEK

SEQ ID NO: 499 - protein, 127 aa, synthetic construct
SSEEEQKEEIKKWKERFIEAFNKGDVDTIFELVHPDATFYDPNGQSYNIEEFRDMIEKIVSQGYQIRLVSLEIQIVPNPGEVTVHVTVQIHQPGANKTYTAHFTDRYRQKDGQFYLVESHYRRDQEE

SEQ ID NO: 500 - protein, 127 aa, synthetic construct
SSEEELREKAKQLVERFYEAFNRGDMEAMKRLIHDDARIHHDNGETYDKDQMIDMLKKILDNDVRLEIKSIEIQVSSVPGQVTVTVHVQVHFDKEGKTYKVTHHWVFQVKDGDMKIVNLHEQTHDTS

SEQ ID NO: 501 - protein, 127 aa, synthetic construct
PSEEELKEQVKEVLERYYEAINRGDMDTVASLFHDDATFRHSNGEQINKEQFVKWLKELFENRTRIQVDEVHIQIDEEPSTVQAQVHVTMHTDGSGKTFHVDESHRLRNQDGEVKFVSTRGHTRDSS

SEQ ID NO: 502 - protein, 127 aa, synthetic construct
MSEKEQEEAIREVIRRFYEAINRGDMDALEELLHDDWRYHHPSGQTFSKEEFKDMVRKLVENGAKFHIDSLEIQIDPSPGDVTVTVHVTVHHDGKNETYRATDHHHLRLSNGDWKIVETQVRTDNTT

SEQ ID NO: 503 - protein, 129 aa, synthetic construct
PVSDKEAEEDIREIVRRYVEALNKGDIEAIASLYHDGARIEFTAEQRTVDKEEFKRWVEEWKRQFKDATIQIDSLEVETKDDGTYTVTVNMTITDPSTGHTVHVQSHMHFKAKTKQLYIASEQIHFQSS

SEQ ID NO: 504 - protein, 129 aa, synthetic construct
MSDDELKEAVKDWLRRFYEALNHGDLDTLKSLFAPDWTFYNVNNPQTYDLDEFIEMVKELLEKFDYRINIEEIRIEIQGRNTVTVHVTFTVQFHHGDETQHYQFHETHHFRFEGDELKLKETRTQTDPT

SEQ ID NO: 505 - protein, 129 aa, synthetic construct
MSDKELKEAVEEWIRREAEIFNKGDLDAWASLFHPDAQYHDSSDPKTYDYEQMREMFERLQRRFDARMQITEIRIQIFGRNEVRVTVRMEVTFNHGDRQEHYTYHYHFVFRFDGDELQLVEKHTTTQPS

SEQ ID NO: 506 - protein, 129 aa, synthetic construct
MSDEELKRAVKDWIRRFVEAFNNKDLDALDELLDDDWTYYDSSRKTQFSKEEYRKMVKELMDKFDFRIQIHEIRIQIFGRTTVTVHVHMTVHLTHGDETHTFHVTETHHFTFEGDELKISETRTTTQPS

SEQ ID NO: 507 - protein, 125 aa, synthetic construct
ASEEEQREAIKEFKTRFIQAVNNGDLDTVRSLVHDDATYHHKGGQSYDKEELLKMIKEMFDNNIQIDVDKIDIQSNGTNSATVTVHVTLHNRTTGQTYETEQHDHYEFRGKRVFLTETHVNTDQT

SEQ ID NO: 508 - protein, 125 aa, synthetic construct
PSEQEFKEAVKEWKERFIEAVNKGDMDALRELFHDDATMHHSGGQTLDKEEIIQWFAEAFKNQTKWDLKEVHIQIDSSDTVTATFHVETTNQRTGRSFDNTQHDHYRFEGDTVKLVETHTHTHES

SEQ ID NO: 509 - protein, 128 aa, synthetic construct
PWRKELEEQVREFVRRYIEALNKGDLDALARHFDDDWRFHDARTGKQYSRDEFKKMVEEMFKANVRVQLDSVEIRVNDDGTVTVTVHVTYQDSRTGRTFKVTEHHHFRREDGTMKVVRTQVHFQELGS

SEQ ID NO: 510 - protein, 128 aa, synthetic construct
PEEKEIEEKIREWVQREIEAWNKGDLETWARLLHDDVRYQNNDTGQEYNKEQMKKMFKEFFDNNIEVQLDEMHVQINPDGSVTVEVHVTFHDRRTGRTFKVTYHLFFRFQDGQLYIVRKRATRREVGS

SEQ ID NO: 511 - protein, 128 aa, synthetic construct
DRREEVERKIREWIKREAEALNTGDVDAWKSLFTDDFQYTNSDTGRTFDLEEVREMVKKLFDAGVRVQVDSMEIRFKPDGTIEVHVTMTFQDSRTGRTRQAHYTDHVRFENGELKVTSRRATTQPLGT

SEQ ID NO: 512 - protein, 128 aa, synthetic construct
PEEKEIEEKIRDWLRRWAEAFNNGDLEKLASLYDDDARYHDSRTGRTFDKDQIKKMLEELLRKNVQIEIKEVHIQINPDGTATVEVHATVHNNSTGNTVDVTYTFHFRFEDGELKLKSQQARFHNRGK

SEQ ID NO: 513 - protein, 128 aa, synthetic construct
PDEEEAKEQLKEWYRREAEAFNKGDVDAWASLFHDDATFRDSRNNQDYDKEEVRRMFEKMSSQGWRVQMDSIEVRIIPNGEVEVTVHFTFTDQRTGRTFKVTAHDRVRKENGTFKFLERQVTTQPTGS

SEQ ID NO: 514 - protein, 129 aa, synthetic construct
PSEEEIREWVKEFLRKMYEAINRGDVDAVASFYHPDATFEHSNGETYDYEQFREMIKRLFEQNTRVEIDSLEIQIDSSRSVTATVHVTMHTNRGDKTQTFHVTQHYHFEYTNGEWKLKRDEVHTEQRTG

SEQ ID NO: 515 - protein, 126 aa, synthetic construct
TSEDEQKKKAKEWLERFYEAINRGDLDALRELLDDDWRYHDASRGQTYDREEFLDMVKKWNDNNWQLDIRSIEFQVQPKDHITVTVHVQFTNRTNDRTIDVREHHHFRFKDGSIKLTETHSHFDSG

SEQ ID NO: 516 - protein, 126 aa, synthetic construct
MDEEELKQIIKEVIERYYDSFNKGDMDKLRELIHPDAQFTNADTGRTFDKEEFLDWAKKATDNNIKIEIHSIRIEVKDKDHVTAEVHVTFKNDKSPQQFDVTNQDFFRFKDGSVKIVEHRTNSDSK

SEQ ID NO: 517 - protein, 121 aa, synthetic construct
PSEEEIERQVRDWLKKFYEALNKDWREVKKLVDPGVTFHFNNTTFTTQDEIAEWVRQFISNATVQVDSIEIHIHDDGSATAHVTVTVTINGQTFTVHETHHFQVDHNGEIRLVETRTHFDE

SEQ ID NO: 518 - protein, 117 aa, synthetic construct
PGEEAIREWVRRYIEAMNRRDVDALASLYHEDATMHVSSGQTFHNIEEIREWYQRFFETFKDVKIEVKSIEIRGDTVTVHMDVTVHRGDQQYHFKVTVHFHFKDGKLKEVQINRDPT

SEQ ID NO: 519 - protein, 116 aa, synthetic construct
PDKEEIKEILRQFYEAIDTGDADKIRELVHEHATMHIYQGRTFTNREEIVEWFERWTSRTRSHHQVDEIHIDDTSKTVEVHVTVTHQETGTTFTFTDEYHFKDGKIVEMRSHEDSN

SEQ ID NO: 520 - protein, 116 aa, synthetic construct
DDREEIKEFLRRFAEAFNKGDLDTMAELVHPDATVHFSSGETLTTRDEIRKWLEEFFKKNDSKVHLKEIHIDSSSQTVHVHWEVTHDSTQQTFTVTTTFHFQDGRLVEVRFHHDST

SEQ ID NO: 521 - protein, 120 aa, synthetic construct
PSEEEVRELIRRYYEAFDKGDADALEELLTPDFQYHDSRNPTTFDLEEFKEMVERFFKTFRDMSREIKEIRVDGGHATVHYTVHVTDYRTGRTVTINATDHMRFKDGRIVSIRSTFDDQD

SEQ ID NO: 522 - protein, 119 aa, synthetic construct
ASEEEAEEFVRKFIQMAFRTGDADAMASMLAPGWTFHDSSGVTYTTREEFKKWFEDMLKRTDEIKVQIDEVRVSDNTITVHVTIHFHHKDDDKTIRFTETHHFRNGQLKETRLHVDNEG

SEQ ID NO: 523 - protein, 119 aa, synthetic construct
PSDEEIIEEAVRRFYEAFNQRDVDALAEILHPGVTFHSAEGVTLKTKDSIKEWMTQFLQRFKDIKVQIDEIRIHGDTVTVHVTVHVTHDGNTHTYEFTHHWVFKDGRIVEVHEQMRDDR

SEQ ID NO: 524 - protein, 121 aa, synthetic construct
ASEEQIREWVKRFYELWAKRNDADTAADLMDDDSTLHVWTGETFTDKEEIKEFAKRWLDTFSSFRVEIKSIEIRGNTVTVHVTIHVTNKDTGTTVTIRYTEHHTFENGRLKETRIHADNQQ

SEQ ID NO: 525 - protein, 120 aa, synthetic construct
DDKREIKEWKERYLQRFFNTRDWRVIRELVHPGVTMHVESQNTTMTDVEEIVRWWKEWLERFPDSKVQVDSIEFDGDTVTVHVTIHTNHKDKTITFTVTYHDKYKDGRLVETHITIRQHR

SEQ ID NO: 526 - protein, 122 aa, synthetic construct
DKREKLRQIAEEFIKTFTEAVNKNDLDTAVEMYHPDAKYTNASEQRTYDREQFREWFKEYVERVGRMQVQIKHIHVDGDTVTVHVEVHYHHNGKTVTTRVTRHFRIKGDRVTRDEVHTDNQQ

SEQ ID NO: 527 - protein, 122 aa, synthetic construct
DKREKLKELIREFFERYVEALNKGDWEKVASLYAPDATYWDARRQQQYSREQFIEWVKEFAKRTGDIEVHIHEIRVHGDTVTVHFTVHYHHNGKTVTTRVTRHFTFKGDKIAEDRQHTDEQQ

SEQ ID NO: 528 - protein, 122 aa, synthetic construct
DKREKLKRIIEEFFERYVKAFNSGDVDAIASMYHPDARFWYSKTQTTYDLEQFREIIERLIKRWGRIQVKIDEIRVHGDTVTVHFTQTWHSNGKTVTARVTRHFTFRGDKIVEDRQHVDDQQ

SEQ ID NO: 529 - protein, 122 aa, synthetic construct
DKREKLKQLMEEFLERYVRAFNEGDADTVKSMYHPDARFTHSKSQQTYDLEQFAKMFEELARRTGRLQVHITRIEVSGDEVTVHYTVHYHTTSRTTTVNVTSHFRFRDDRITEERVHEDDQQ

SEQ ID NO: 530 - protein, 122 aa, synthetic construct
PQEEILKELIRRFIETYVEALNKGDVDKLMSLFSPDWKYHLDKTKETFDREEFREWFQRLSSQVRRMQVQIHEIRFDGNTVTVHVTVHIHHDGETVTSRQTEHHTFEGNKIVETHVHADDQR

SEQ ID NO: 531 - protein, 122 aa, synthetic construct
TSEDQKKAKDILRRFFEAWDKKDLDKLASLFHPDWTNHVSYEQITFTTLEEFKEWVKKWFDRGFDKSRHQIDEIRISSHTVTVHVTIHQTRNGQEFTYHVTEHHRFKDDRITETHQHMNQED

SEQ ID NO: 532 - protein, 122 aa, synthetic construct
SSEDQQKIKEIKKRMLEAMDNKDADTFASLFHPDAQMHIEQYNITFHNREEIKEFFEQLIKNGFDRVHHQIDEVHISTHTVTWHITAHVTRNGETYTYHFTAHDRYEGDKLTETHYHSRQQD

SEQ ID NO: 533 - protein, 118 aa, synthetic construct
PEEEHIRTLLERFYRALDEGDLDAIRELFDDDAEFHNKSTGQTYDLEEFLRMIEERLKRNKDSRHEIKEVRITGNHATVHVTVTFHHDGRTHTYHVTHHWHFRDGKIARLQEQSHDAG

SEQ ID NO: 534 - protein, 118 aa, synthetic construct
PDEEEIKEILERYYEALDKGDWKAIEDLIHDDARYHNASTGQTYDREEFLDMIRKWLSTFQDSRHELKEIRFTGKHVTVHVQVHVNTPGSTQTYDVTHHWRFKDGKIVRIEEHRRDTG

SEQ ID NO: 535 - protein, 118 aa, synthetic construct
PEEEEIKEFKKRFIEAFDKGDWEAIEELVDDDVTFHFASTGRTYDRDEFIEWIRQWLRHFKDVKRQIHEIRITGGHATFHVTVTVHHDGSTRTYRVTVHDRYRDGKLTETRFHVDDAG

SEQ ID NO: 536 - protein, 119 aa, synthetic construct
ASEEEIRQALRRFYEAIDKGDLETLAQLFHPGAQIHFSDGVTLHDQEEFKEWMTKFLSQVSDIKHEIEEIRIDGQTVTAHVTVHVNQGDKTYTMKVTEHHHFKDGKITETHFHFDRKNT

SEQ ID NO: 537 - protein, 119 aa, synthetic construct
TSEEEIREVLKEFYRAIDQGDWETLRSLLHPGARIENSNGIEFTDQEEFIRWVREFFRQVTNVHRQIKRIEIDGDTVTVHVEVHVTQGDRSYTQTVTEEHHFKDGKIVETRIHVDTKQN

SEQ ID NO: 538 - protein, 119 aa, synthetic construct
PSEEEIKEVLRRYYEAFDNGDWETVRRLFHPGATIHISQGVTITDLDELRRFFEELFKKLTDVKHDIKRIEIHGDTVTVHVTVHVNQGDQTFTIDVQEHHRFKDGKITETRTHIDTKRN

SEQ ID NO: 539 - protein, 119 aa, synthetic construct
PSEEEIKRIKKRFIEAFNTKDLDELKRLFHPDATMHIWNGQTFTTLDEIKDWFRKFMESVKRFHMQLDRVEIDGETATFHVTVHVHTKDKTVTIRVTVHDRYENGKLIESQFHEDQKDT

SEQ ID NO: 540 - protein, 119 aa, synthetic construct
SSEEEIRQWVRRYVEAFNNGDLDALKSIFHPDWTYHDASGQTFTTRDEFKKWVKELMEKVKSYRLEIDSMEIRGNTVTVHGTLHVNHDGKTVTIHVTEHHHFRNGKLTETRVHRNTQPT

SEQ ID NO: 541 - protein, 119 aa, synthetic construct
PSEEEIKRFLKRLYEAFDSGDADALFNLFHDDWTFHSSDGRTFNDREEFREWVERFFKRFGDTAHQIDEIRIDGDTVTVHVTAHFRHPGKTITVHVTDTHRFRNGKLTETRVHVDQQET

SEQ ID NO: 542 - protein, 118 aa, synthetic construct
PSKEEIKELKERLLEALDKGDMEKLKELVHDDATFHFDNQTFTSKEEFLEWVERFFKSIKDTHREIKEIRIDQDTVTVHVTQHTTHGDKTITVHVTTHDTYTNGKLTESRIHRDTQPT

SEQ ID NO: 543 - protein, 118 aa, synthetic construct
ASQEEIEEWLRRFYEALNRKDLDAVRELIDEDSTFHISDGSTLTTADEVKEWVKQMVERFNRFRIEVKSIEIRGDTVHVHYQVHFDSNSQTITVDATDTFHFKDGKLTEVHSHWDRKE

SEQ ID NO: 544 - protein, 118 aa, synthetic construct
MSEEEIKEWLKRFYEAFQRKDLDALRELIDDDSQFHWSNGETIHSADEFKEWVKKFAEDFPDFRVEIKRIEINGDTVTVHVQFHFTNNSQQQTFDVTDHYHFKDGRLVQVHSHINQKD

SEQ ID NO: 545 - protein, 116 aa, synthetic construct
TSEEQAKELKERLVEAFNKNDMEKLDELVHPGAQFHHNGQQYDKEEYKDWVRRLLERFDVQIEIKSIEIRGNTVTVHLTAHFHTNGKTVTFHFTVHDRYKDNRLTRSEEHTNNAND

SEQ ID NO: 546 - protein, 116 aa, synthetic construct
MSEEEIKEFKKRLLDAFDNGDMETLDRMFHPGAQFYHNGQQFSKEEYKEMVERMLSRWKFDHQIDSIEINGDTVTVHVTVHRTTNGKTVTVHFTAHDRYTDGQLTESRFHEDNRND

SEQ ID NO: 547 - protein, 120 aa, synthetic construct
MSEEEIREWLKRYYEAWNNKDLDKIKSLLAPDWTYHHSSGRTFHDPEEFAKWVQELMETFKEFRIDIKEIRIDRSHSRVTVHIEVHWTQDGKHQTTTTTDHHQFDHDGQLKETRVHWHQA

SEQ ID NO: 548 - protein, 120 aa, synthetic construct
MSEEEIREIDKRRIEAFNHGDLEKLERIVHPDAQFHFSDGETIHNLEEFKEWVERVLRRFPDTKIEVKEIHIDSSTNRVEVHMTVHHTHNGKTTTVDVTYTVRYDHDGKIVEVRETRNQR

SEQ ID NO: 549 - protein, 120 aa, synthetic construct
MSQEEIKELKKRWIEAWNKKDRDKLRDLYHPDAQFHYSNGRTFHNLEEYLKWFSEFLKKFPRTHLELKSIHIDDSTNRVTVHIQMHLHHKDETRTVDVTQHDRYAPDGKIIESRLHFNPK

SEQ ID NO: 550 - protein, 120 aa, synthetic construct
PSEEEIREWIKRYYEALDRKDLEALQRLITDDVTFHYSNGTQINTKEEFTEWVERWMKTWAEVHHEIKEIRIEGDTATVHYTVHLRHKNGQTYTIDATDHFHFDKNGKVKRVQSHSNQRD

SEQ ID NO: 551 - protein, 120 aa, synthetic construct
PSEEEIKEWLERFYDALDRKDREALDRLFHDDVTMHVDEGTTYTTKDEIKEFLERWLETWDSTAHEIKRIEIEGDTVTVHYTTHLHHKSGQTFTQDATDHFEFDKDGRIVRVESHTDQKD

SEQ ID NO: 552 - protein, 120 aa, synthetic construct
PSEEEIKEIKKRLAEAFNRGDVDTVASLFHDNVTMHTYNGQTFHSKEGIRKWFERFIREFPEIHMQIERIEFNGDEVTFHFTVHATHPDGKTVTIHITVHDRYDKDGKIVESEFRVHQQD

SEQ ID NO: 553 - protein, 121 aa, synthetic construct
MSDEEIKEWKVKAEFEAVNRNDADAFAELFHDDSTVHFDEVKITFTNKEEIRDWYKKWAERVGQVHLQVDEVRVEDSDTTVRVHMTIHLTHGDKTQTIHVTQTDRYQDNFLKEQHITVRST

SEQ ID NO: 554 - protein, 121 aa, synthetic construct
PSEEEVKEFVVRAFLEVFNTNDMDKLKSYFHDDATVHFESEQRTLTTKDEIKEWFKQWFERVGDFKVQIDSVRVTDSIITVHVTVTIHFNHGDQTRTVTIHFTDRYVGNKLVERRVRVDQQ

SEQ ID NO: 555 - protein, 120 aa, synthetic construct
PDEEKAKELLKQFYEAFDKGDWEKLVSLVHPDAQFHFNDGSTIHDQEEFRKWYEEWKSRFPEVHRQIHHMRIEDDDATVHVTVTLTFTHNGQEYHVEVHETHRFRGDKIVETHVHENEQK

SEQ ID NO: 556 - protein, 118 aa, synthetic construct
SGREATKEWKKRFVEALNQGDLDAIMRLFHEDATLHVSKGETYTDKSEIREWFERWLKSLKDVKIQIDSIEIRGNTVTVHMTMHVNRGDQTYTFHITTHDHYKDGKLTETHFHEDSRD

SEQ ID NO: 557 - protein, 124 aa, synthetic construct
TSEEQIRETLKRFYDAFNRKDLDALREIVAPGVTFHFSKGITVTDREEFLDWVKKFLEKVKQMHIQIHSIEIRQNEDDTITVTVHVTVTLHHDNKTITMTVTDHYRFKDGKLVEVHSNIDQEDS

SEQ ID NO: 558 - protein, 124 aa, synthetic construct
ASEEEIKEFVRRFVEGFNNRDADKIASLYTDGATLHVSEGRTFNSRDEIRKWAKEFLDKVKQVHIEIKSIEIQQDEDKQVHVHVHIEVHLHHDNKTTTVHITSTMTFRDGQLVEEHIHVDSEDR

SEQ ID NO: 559 - protein, 124 aa, synthetic construct
TSEEEIKEFIRQFLEAFNKKDLDLFASLFDDGAQLHISNGVTFNSQEEIKKFLKELLDAYEELHMHLTSVEIRQNEDETVTVTVHWEVHVRQNNKDITMTITTHFTFKDGKLKRVKIDIDQEPK

SEQ ID NO: 560 - protein, 124 aa, synthetic construct
PSEEEIREFVKRFLEALNKRDLDKVRELFTPGVTLHINNGVTYTTQDEITKFFKEFLDSFKDIKIQVTEIRIEQKDDSTVTVTVHWEVHAHHDNKTVTLHMTTHFHFKDGKLVEVRIHIDSEDT

SEQ ID NO: 561 - protein, 119 aa, synthetic construct
PSEEEIKRLIKRFAEAFDNGDMEKLASFYDDDATMHVSSGYTATTREEIKEWFERFFKNFPNTRHEIKSIEIRGDTVTVHVTVTVHHPGKTITIHVTRHITFDKDKKIQRDQIHLDERD

SEQ ID NO: 562 - protein, 119 aa, synthetic construct
PSEEELKEFLEKFYEALDKGDLDTLRELLHPDVTFHFRDGETITTMEEFEEWFKKLQSRFKDSHHEIESIEFSDGTVTVHYTAHFHHKDETVTVHATDHYEFDHDGKVKRVKSDYDERR

SEQ ID NO: 563 - protein, 119 aa, synthetic construct
PSEEEIREFKKRLVELFDNRDLEALAQLYHDDATFHYADGVTVTTKEEFKEWVKRVLDRFKNARHKIDRIEVSDGTATFHITAHFTHDGETVTIHATQHDHYRKDGRLTRSEDNSEERR

SEQ ID NO: 564 - protein, 119 aa, synthetic construct
PSQEEIREILRQMYEAFNNNDLDAIASYFHPDATYHIWNGRTITTLEEFKEWLEEVMKKFKDLRIEIDSIHVSDGTATVHVTFHVHHDNETVTIHATETHHFDHNGKIVETHNNADEHR

SEQ ID NO: 565 - protein, 119 aa, synthetic construct
PSEEEIKQWKRRFLEALDRNDRDELKSLFHPDATMHLANGQTFTNLEEILKWLKERMEKFQNTAHQIEEIRVSDGTATVHVTVHVHHKDKTITFHFTQHDRYDKDGKLVETHDNTNQHD

SEQ ID NO: 566 - protein, 119 aa, synthetic construct
PSEEEIREMLKRFYEALNHNDLDTIEELLHPDATFHHASGTTFTTLEEIKEWVTRMLRRFKDLRIQIHEIRVSDGTVTVHVTIHVHHDNKTVTIHATHHWHLDKDGKVTEVHDNSDQRD

SEQ ID NO: 567 - protein, 119 aa, synthetic construct
PSEEEIKEWIRRYMEALDRNDVDAVASLYDDDATMHIYNGQTFTTKEEIREFYERWMKSVRDTAHEVKKIDVSDGTVTVHVEVHLHHDGETVTIHATVHLRFDKDGKLKELRDNAESRR

SEQ ID NO: 568 - protein, 118 aa, synthetic construct
ASEEQIKEWLRQWYEAFNTGNWEEAIKRLVDKDWTYHYNNQTFTDLDEVLKWFERMFKSGAHDIKRQVDEIRIDGDTVTSHVTQHVTSNGEHYTYHITEHHRFEGDKITETRVHEHST

SEQ ID NO: 569 - protein, 118 aa, synthetic construct
MSEEQIKEILRKFYEAMDTGNVEDAIREVFHDDAQMHVNNQTFTSKEEIVEFFKRQWSSGNDEVHREIHSIEIRGDTVTVHVTVHFHSKGETQTYHVTHHWVFKDDRVTEVRQHTNST

SEQ ID NO: 570 - protein, 118 aa, synthetic construct
TSEEQIKRLVQKFLEAFDTGNVEDAIREIYHPDAQLHVDNQTMHNLEEIVEFFKRLFASGQKEVHRQVDRIEIDGDTVHVHVTVHFHHDGETQTYHQTSTFHFKDDKLTEEHIHTNST

SEQ ID NO: 571 - protein, 117 aa, synthetic construct
AHEEEIREWIKRWVEAFNKGDADTLAELYDEDSTLHDSNGQTFTNKDEIKKWAEEFFKRADDTKVEIKSIHIDGDTVTVHVTVHVNHNGQKYTFHFTSHLRFKDGKLKEQHIRTYQT

SEQ ID NO: 572 - protein, 117 aa, synthetic construct
THEEEIRQWVRRYAEAFNKGDMDTLKSLYSDDSTYHNSNGITATTKEEIVKFIKEWLEKVGDSRFQIDSIEIRGDTVTVHGTVTAHTNGQQYHQTITRHFEFKDGQLKRDEARIHQQ

SEQ ID NO: 573 - protein, 118 aa, synthetic construct
TSEEQLKELLRRLFEAFDKGDWETIAKLLHPGATMHIWDGYTATDLEEIIEWVRRWFKSVKRVHREIKEIRIDGDTVTVHWQMHVHHDNRTITRDGTTHFHFENGKIKEVRFHVDQRD

SEQ ID NO: 574 - protein, 119 aa, synthetic construct
PDEEKIRQWVQRFFEEVDKTGDWRAFASYYHPDATVHYSEGKTFTTLEELARWLATWVRNVPDFRVEIEEIRIDGKTVTVHVTIHVHHKDKTTTVRQTSHFHFRGDKLTREHVHRNNSD

SEQ ID NO: 575 - protein, 118 aa, synthetic construct
PSKEEIEEFLRRFYEEIFKTKDPDAFMSYFHDDATYHYNGRTFKTKEEIKDWFEKYMSSFERLHVQVDEIRIQDGHATVHVTVTAHQGHETIHARYTHHWEFRGNRVASLREHSDQQD

SEQ ID NO: 576 - protein, 118 aa, synthetic construct
MSQEEIKEFLRQLYERLWNTKNADVFLEYVHDDATYHNNGQTYKDKEEIKEFFQRWFAHFPELHVQIEEIRIENGRATVHVTIHATQGDEDVTFHQTHHWVFKDKRITEVRVHTDTQR

SEQ ID NO: 577 - protein, 121 aa, synthetic construct
SSQEEIEEILRRFFEEVWNTNDREAVKSYFHPGATYTDARTNTTYPADAEELAEWFSEMFERIKDLHVQIKEIRVSDNTVTIHWTVHTNHGDQTHTFHATTTFHFKDGKIVEVRTNMNQTD

SEQ ID NO: 578 - protein, 119 aa, synthetic construct
ASEEEIRELIKRFFELFDRGDLDALASLMHPDWQFHFGDETAHNLEEFKDWVREWLSTYGESHHDIKRIEIDGNTVTVHVQVHFHSPGGKTITVDVTEHHHFVKDGKITETRVHYDQKE

SEQ ID NO: 579 - protein, 119 aa, synthetic construct
PSEEQIRELVRRMIEAFNKRDLDALFELYHPDATFHYNNRTFNSREEIKEWFKRFFEKFGEVHVQIEEIRIHGKTVTVHVTVTVHHPGGKTVHIRVTSHFHVHDDGKITEERVHSDQRE

SEQ ID NO: 580 - protein, 119 aa, synthetic construct
PSEEEIREFLRRFYEAIDKGDLDTLKELFHPDARMHINNRTFDSLDEIKEWFERMLSRFKDTAHQIDRIEIDGNTVTVHVTVHFTHDGGKHVTVHVTHHWHFVKDGKVTRLQVHENQQD

SEQ ID NO: 581 - protein, 119 aa, synthetic construct
PSEEEIRQIKRRFIEALNKGDLDALEELFHPDARFEWGDQPFDSKDEIKEWFKRWMESVGRYEIRITHMEVEGKTATVHVQVHVHHPGGKTTTIDFRAHDHYHDNGKITETRITWDTKE

SEQ ID NO: 582 - protein, 122 aa, synthetic construct
VSEEEVKEWVKRFFEAFQKRDLDTLAELLTDEWQYHHYSGNRTETLTTKDEMREWFKRFLSSFDVKIDEIEIHIHDDGTVTVHVHITFRSGDKQFTMTVTETHHFKDGQIKETHQHVNIQDH

SEQ ID NO: 583 - protein, 122 aa, synthetic construct
ASEEEIKEWVRRFIEAFEKRDFETLKELLTEDWTMHSQSGNTSETATTLEEFEKWVREFLSKIDLQFDELHIHVHDDGTVTVHMTVTVTSGDQQFTVHVTEHHHFRNGKITETHITFNYQPH

SEQ ID NO: 584 - protein, 122 aa, synthetic construct
ASEEEIKEILRQFYEAFQKGDLDKLLELMDKDATLHFHQGNETYTLTTKDEFREWFREFKEKFDIQFDELEIRVESNGTVTVHVKVTVRSGDKTYHMDVTETHHFKDGKITETRTHIRVQPT

SEQ ID NO: 585 - protein, 122 aa, synthetic construct
PSEEEIREWKKRFFEALQKGDLDALLEIVDPDVQFHFYEGNRTYTATTKDEFKEFMRQAFEKFRFQIDEIEIHIDDSGHVTVHVTITVDSGDQKFTVHVTQHDRYENGKLTESREHRNWQPN

SEQ ID NO: 586 - protein, 121 aa, synthetic construct
PSEEEIREWKRRFIQEFWNTRDYHAVERFFHDDAEMHVYRGETFTTKEEIVRWFRQVLSQFPEAHVQIDSIEIRGDTVTVHVTFHLTRPDGKTVTYHITYHDHYKDGKLTHTRFHVDTKET

SEQ ID NO: 587 - protein, 117 aa, synthetic construct
PSEEEIREFLKRWYEEFVNEKDADKAASMIHPDATFHSDNTNLEQWKERVERTFRHTIDEIHVEIKSMEVRGNRITVHVTIHVHHKNGQTYTFDATHHWVFRNGKITHVNEHTRQHP

SEQ ID NO: 588 - protein, 118 aa, synthetic construct
PDQEKIKDIKTKFFEAFDRKDLDTMVSLFHPGATVHFSDGITHHNLEEFKEYIKRLLDTFKETAHHMKRMHINGDTVEVHVEAHFKSDNQPRTFRVTVHDRYKDDRITESHFHWDEEN

SEQ ID NO: 589 - protein, 120 aa, synthetic construct
ASEEELKEILKRWYEEVWNSGDWNAAASYIHDDATMHIWNGQTFHNRDEITEWIRRFLSSMKDVRFEIKRIEVHGDTVTLHGQLHVNHDDRTQTIRYTHHWTFQDGRIVRVEFHNDTGSS

SEQ ID NO: 590 - protein, 120 aa, synthetic construct
ASEEEIRSWAQRYYEEADNSRDAEAIASLLHPDAQVHFARYQRQYDREEFREWLERWFRSVGDAQREIESIEVRGNTVTVHVTMHVTHNGKNVTIRATHHWHFRNGKLVEVRVREHTHES

SEQ ID NO: 591 - protein, 117 aa, synthetic construct
PMDRSQIEEWVRRFIEALNHKDMDKLRELYHPDATLRYSGDHGLDAVMEWLKQWLEKFNNTRIEIKSIHVHGDTVTVHVTVHVRRGDEDQTFQFTSHFRFESNNRLVSEQIHTQPVD

SEQ ID NO: 592 - protein, 117 aa, synthetic construct
PTDQSQIRDLIKKFIESFNNKDVDLVRELVHPDARLDASQSDGLDEIVEWFKRALEQFKNAQIQIHSIHIHGDTAHVHWTMHTHHGDQTYTYHGTTTFHFVKDNKITSIRIHVRQKD

SEQ ID NO: 593 - protein, 117 aa, synthetic construct
TSEEEIRELLKEFYRALDEGDLDKARSIIHPDATMHISEGTTFTTQDEITKWVEEWIKKFSNVQRHIHGMEINGDTVTVHSRVTFTHNGKNKTVDVTDHYRFKDGKITNFTSHFNDT

SEQ ID NO: 594 - protein, 123 aa, synthetic construct
PSKEEVEEWLRRFYTAWNNKDIDALAELLHDDWTYHNNQEKVTLTTKEEFRKWVKEFLDKAKEVHIQIDSIEIEVRGDEVHATVHVTIHVHHDDRTTTIHATDHHRFRNGKLIETHSTLETRE

SEQ ID NO: 595 - protein, 123 aa, synthetic construct
PSKEEIEQWIRQYYDAFNKGDLDRLAELVHPDVTFHFYEEQITLTTLDEFREWLERFMRTFKEVHVEIHSIEIRVDGNEIEVTVNYTMHVHHDDRTITVHGQDHFRFRNGKLVEVRSRLETRE

SEQ ID NO: 596 - protein, 123 aa, synthetic construct
ASEEEIREWVKRFFDAFNNKDLEALQRLVHDDVRMHVAKEQITFTTKEEITEWVKEFMKRFKRVHIQIESMRIETHGNEYTVHVHWTMHVHHDDRTVTLHGTTTFHFRNGKLVEVTFHIEERE

SEQ ID NO: 597 - protein, 123 aa, synthetic construct
PSQEEVRQLVERMVEAFNNKDVEALKSLYDDDATYHDSSSNETLHTKEEFERWVRQWMSTFKDTRMQIDEMHIEVRGNEVTVHVHVTVHVNHDDKTVTLHITSTIRVRNGKIVEEHTHVDERE

SEQ ID NO: 598 - protein, 118 aa, synthetic construct
ASEEEIRELVKRMIDAFNHKDLDTLASLYHDDATMHVSDGYTANDKEEIKEWFERVMRTFPDHRLEIKSIEIDGQTVHVHVQMHTTHDNKTVTMHVTSTFHFTDGKLIEERIHVDNRD

SEQ ID NO: 599 - protein, 119 aa, synthetic construct
PDEEQIREFVKREVEIWNNRDLEKWKELFDPDVKWTNAATGQTYDREELIEMIKRILETFKQIQIEIKDLHISDDSYKVTVHVTVHFHRGDRTTTIDYTHHFHFRNGRLVRKQTHEDSK

SEQ ID NO: 600 - protein, 119 aa, synthetic construct
PDEEIAREVAKRYYEAWDKGDWEALEELVHDDATFHEAETGNTYDKEEWIERYKSFLSQFPRIQRQIHDMHVSDDSNTVTVHGTVHFHRGDRTHTIRFTHHWHFRNGKIARMEEHVDTG

SEQ ID NO: 601 - protein, 125 aa, synthetic construct
PEQEEIKEWIRQFLDQMFRALNQGDRDTIKSLYSDDATMHIYQGITFTTKDEILEWYERISSRFPRIHWEIKRIEVSDGTATVHVRVTFTHPTGEQRTYQITSHFHFDKDGKLTEEHIHTQPVPS

SEQ ID NO: 602 - protein, 125 aa, synthetic construct
PKQEELEEIVRQFIERFVRALNNGDLDAVASLYHPDATMHIWEGITFTTPEEIREWIKRWAERFPEIHVQITEIRVSDGKVTVHVTVTFTHPSGKRHTYQVTRHFRFNKDRQLVEDRIHMQPVPN

SEQ ID NO: 603 - protein, 122 aa, synthetic construct
PSQEEIKETKKRFVELFNRGDVEAAVRELFDDDSEFTHSETNTTKTASREEVIERFKRWFDSWPEVHIQIDSMEITSGDATVHVHVTIHATRNGKTTTFHVTVTDHYKDGKLKRSQEDTGST

SEQ ID NO: 604 - protein, 119 aa, synthetic construct
DEREEIKEWIKRFFEAFDKHDLDKLISLLHDDATVHFSSHNVTLTDKEEFKEFIERMLSRFKDSRHEIESIEFRGDTVTVHWTAEFHHGDQTYTVHGTTHIRFKDGRVIEVRFHVDETG

SEQ ID NO: 605 - protein, 119 aa, synthetic construct
DEREEIEKFVRRLFEAFDKNDWEEIARLLHDDATIHFASEQITLTTKEEIKEWLKEWIKKVKDTAHQIDSIEFRGDTATFHWQVHVTHGDKTQTNDATTHFRFKDGRLIEVRVHIDSTD

SEQ ID NO: 606 - protein, 119 aa, synthetic construct
DLREEIKELVERWFEAFNRKDLEALAELVHDDARIHFASEQVTMTTREEYKKWLEEWFKRVEEIHFQIDEIRFHGQTVTVHWTAHVTRGDKTVTYHGTTHFVVQDGKIVEIRVHVDQTD

SEQ ID NO: 607 - protein, 119 aa, synthetic construct
PEREEIKKWVERFFEALNKKDLEALAELFHDHATVHFSMTQITAHTRDEIKKWFEEFFKKAEEVHVQIKEIRFHGDTVTVHWEMHVTHGDQPYTFEGTTHFRFKDGRLVEVRFHVRQTN

SEQ ID NO: 608 - protein, 119 aa, synthetic construct
DDREAIKEFKERLLEAIDKGDLDTFISLLHEDVTFHFASEQITLTTKEEIKDWFEKWLKKVKQTAHELHSVEFHGDTATFHFTVHVNHDTKTVTIHATSHDRYKDGRLIETRIHENTTE

SEQ ID NO: 609 - protein, 118 aa, synthetic construct
SSEEEAKEAARELVERFYEAFNKGDLDLLKELMHPDATIHFSEGRTYHDLDEFIEAVKEFLKRNIKLNITSLHAEVDGDRVTVHVTVTMKDEVHHTWHFQRDHDGDFKVVEVREHTTG

SEQ ID NO: 610 - protein, 125 aa, synthetic construct
PPEDEEKIRQWKKEFLDALNKGDADRLLEIIHPGSTFTFNGQTFTTKDEFKEWVERMKRRDTKFQLDELHIEFDKDHITVRVHVTIHTNDNSQPYTVHVTARDHYRKINGQWYLVRTEFHFHDSR

SEQ ID NO: 611 - protein, 125 aa, synthetic construct
PREDEEHIREWIKREVEAFNKGDWEAWLRLVHPGSTFTYNGQTYTTKDELREWFEHAQKRNTQIHIKEIRIQFTQDHATVEVHFQMTVNDNSQQYHVEVTQTDHFRKINGQWYLIRREVHSDDKR

SEQ ID NO: 612 - protein, 125 aa, synthetic construct
PEEDEEHIRQWYRREAEALNKNDLDAWASLFHPGSTVHFDGRTFTDQEELREFFKELASRNFRIHIESLEIHIDKDHATATVHFTVHWNTTSQPYTVKYHATDHFRKKDGKWYITERHVHTDDKR

SEQ ID NO: 613 - protein, 125 aa, synthetic construct
PEEDQEKIKEYKKRLIEAFNKKDVDALAELVAPGATFHFNGQTFTTKEEFKEWVKQMASNDFQIHIDSMEIQFTKDTITVHVHYTVTFHESSQTYTVHATATDHYQKRDGRLYLVETRSQFHDTR

SEQ ID NO: 614 - protein, 125 aa, synthetic construct
PPEDEEKIRQIVEEEFEAFNRGDLDRWLELWHPGSTLHVNGQTFTSKDELKEWMRNLLRNNVQMEIKEIRIEFSDDHATVEVHFTMTMNRDSQQYHVDATATIHLRKVNGDWKILEKHVQYNDKR

SEQ ID NO: 615 - protein, 125 aa, synthetic construct
PPEDQEAVKEVVERFLEALNKGDADAVASLFHPGAEFHWNGQTFTTKDEIRKWVKEFNDRRIRVEVKSIEIHVDENHATVHVHWTMTVNDSSQPYDVDVHTTFHLQKRNGQFYILEVHFHVDDKR

SEQ ID NO: 616 - protein, 124 aa, synthetic construct
TPASEEQIKEIIKRLAEAFNKGDMDAIKSLYDDDATMHIWNGQTFTSKDEIKRWFTELHKNDIEVHVQVVEIRVHGKTVHVTANFEFRDRRTGRTVRITRHITIRVTDNGELRIVEDQFHSHND

SEQ ID NO: 617 - protein, 121 aa, synthetic construct
PSQEQVKEWANRFYEAFNKKDLDALYSLYHDDATFRDARTQQDYDRDEFREMVRQMLSRDIQLHWEIKEIQISDNHATVTVEVHMTDQTTGKTVTATQHFEFRRDHDGRVYLLRDEVHYQE

SEQ ID NO: 618 - protein, 121 aa, synthetic construct
ISEEQIRETIKREFEAFNRGDLEAWASLFHDDATLRDARTNQDYDKEEMREMIERMLSNNVQLHVEIKEIRVTGNHATVHVEVHVTDSRTGTTVTFTTTIHFRLDHNGQVYIVEKRLHFQS

SEQ ID NO: 619 - protein, 121 aa, synthetic construct
PSQEEVKEILRQFYEAINKGDVDAVASFYHDDATIHFSQTNQDYDRDEFREWVERMIRANVQIHFEIKRIEVSDNEATVTVEVTVHDSRTGTQVHFTQHIRFVKDHDGRIKIVEDRIHFNT

SEQ ID NO: 620 - protein, 121 aa, synthetic construct
PSEEQVRELKKRLVDAFNRGDMETFDRLVHPDATFEDASQGRTYDREEFKKMLEEMWKAGIRLEFHIEEIEFSDNEATVHVRFTMTDSRTGRHIDARATDHYRLDHDGQLYLVRTQFHWQT

SEQ ID NO: 621 - protein, 121 aa, synthetic construct
PSEEEIREIIRRLYEAINNGNWEEVARLFHDDWRYHNAKTQTTYDLEEWRRWVERFHKNNIQIEVEIKEIQFSDNEATAHVRVTVHDRRTGQTFHATDTHFFRRDHDGRIFIIRTQVHYQD

SEQ ID NO: 622 - protein, 121 aa, synthetic construct
PSQEEIRQFVNRFYTAINRKDADEVAELFHPDGTFTFASTQRTYSLEEFIEWVRQAASNDFRFEWKIDEIQISDNEATVHVTVTVHDSRTGTTYQVHETHFFRKDHDGRIKIVRTEVTHQS

SEQ ID NO: 623 - protein, 119 aa, synthetic construct
PSWEEAVKEWVKREVHAFNSGDMDAWLSLFHDDVTMHDSNGQTFNDLDEMKKWAEELWRQGAEVQIDSIEIKEITETEITVRVEITFRKTNTTVTFHITFRLDHDGSWKVVEKHVRTDN

SEQ ID NO: 624 - protein, 119 aa, synthetic construct
PSDEEAVREWIRRFYDAFNKGDADALKSLYDPDAQMHISNGRTFNSRDSIKRWFTELFKSGVEIQIESIQVDEVTEKEVHVTVHFTMKQHNITVTQHITFRKDDNGQWRVFRDEIRFHN

SEQ ID NO: 625 - protein, 119 aa, synthetic construct
PSAEEAAKELIRRFVEAFNKGDADAAKELYDDDAQMHIWNGQTFNSKDEIKKWFEEFHKAGFSIRILSIQVDEVTETEIHVTVHIQVDQYNIRFTSHVTVRRDHDGRWKIFEERIQNNN

SEQ ID NO: 626 - protein, 119 aa, synthetic construct
PSDEEAIKEWVEREIDAYNKGDLDAWASLFTDDVTVHDANGQQFNSKEELKRWVKEMIEQGREIQVDSIRIDEITEKQVTVTVHITDKSQNITFTMHLRFEKQDDGSWRVIEKRMRNDS

SEQ ID NO: 627 - protein, 117 aa, synthetic construct
PSEEEIRQVVRRFFEAFAKRDMDTLRDLYHDDATFHYNGRTFKDKEEILEWFKRLLDNIQRMKIDVEVHVDGKTVTVHSTVHRTHNGQDRTQHVTSHFHLDDDGKIVEERVHSNTQE

SEQ ID NO: 628 - protein, 117 aa, synthetic construct
PSEEEIREAVKRFYEAFNKRDADALMRLMHPDATFTYNGRTFKTPEEIKDWFEKVLKNIEELHVEIHIEVRGDTVTVHYQVHFTHNGQTYTVDATDHFHFDKNGKIKRIQSHTRQTE

SEQ ID NO: 629 - protein, 117 aa, synthetic construct
PSEEEIREFKKRFFEIVANGDMDAFKELVHPDSTFHWNGTTYKDKEEVAKMFAEFASTLQDAKFDIEIHVDGDTVEVHITVHMTRNGQTFTFHITVHDRYDKNGQLVESRFHENQQR

SEQ ID NO: 630 - protein, 117 aa, synthetic construct
PSEEEIRETVKRWFEAFQNRDLDALADLYHDDATVTIDGQTFKDRSEIKEWAERVLKSIQRLKWDTEIHVDGDTVTVHSTFHTTHNGQDFTFHVTVHLRLDKNGKIVEQHTHTNEQK

SEQ ID NO: 631 - protein, 117 aa, synthetic construct
PSEEEIREILRQFYEAFAKGDWKKLSEIVHDDATMHVDGRTFKTKEEIVRWFREVWKKMSRAKFDVEIHVDGDTATVHVTVHTTHNGQDYTFHVTDHYHFHKNGKITRIQSHTNQER

SEQ ID NO: 632 - protein, 119 aa, synthetic construct
DLEEQVKEWLRQFYEALDKNDLDTAMRLLHPDATFTVDGQTFKTKDEIRKWFEEQLRSMRDIKREVSIYSITEREVTVRYTVHVNHPSGQTFTIDAQDHFRFDKDGRITEVRSHRDQKD

SEQ ID NO: 633 - protein, 119 aa, synthetic construct
DFKEIAKEFLKRLYEAFDRGDVDAFAELIAPGWTMTVNGQQFDTPEEVRTFIERVLKSLKHSRREVQVIEATDRTVTVESTMHTTHDNGQDFTFHAHDTHRFDKDNRLVETRSHTDPKE

SEQ ID NO: 634 - protein, 115 aa, synthetic construct
SSQEEIKEVLRRFYEALNKGDWKKIADLIHPDATFHHSNGQTYDYEQFVEMIKKYASDSKTRLEIEEMHIHGDTATVHVTIHQQRDTSRHTTHVTHHWHLKDGKVTELREHTNNT

SEQ ID NO: 635 - protein, 113 aa, synthetic construct
TDESQIRDWVRRYIEILNNGDIDKLKELFDEDWTYHDIARQQTYNLEQFLEMVAQFMSRASTASLEIKRIEIGGDTATVHVTDHTKDKTFHYTEHHHFKDGKLTETRQQTDDG

SEQ ID NO: 636 - protein, 113 aa, synthetic construct
TDESQIREWVKRWIEAFNRRDVDAIASLYHDDARITFEENNQTYDKEEFREWVERFMRTFPDFQLELKEVRIGGDTVHVHITFHHNNRTVHVTSTFHFKDGRLTEQRIRTDST

SEQ ID NO: 637 - protein, 113 aa, synthetic construct
TSEEEIKDIKKKLVEAFNKGDADTFAELVHPDATFHFAQGITLTSKESVRKWFEEWVERNKDYRIEIDEIRFDGDTVTVHLTVHLGDTTVKVTTHDRYKDGKLTESRSHFQPT

SEQ ID NO: 638 - protein, 118 aa, synthetic construct
SESEEAIRDWIRRWVEAFNKRDVDALASLYHDDATVHFTQGETFTTKEELRRFIERYLRTFKDVKMDVEEIRVDGHRVTVHMTVTVHHDNSTQTYHYTVTLEFNGDKLQEQHVHIHHS

SEQ ID NO: 639 - protein, 115 aa, synthetic construct
MSEEEIKEWKRRMVEAFNNGDLDALADLFDEDSTFEVNKGEQFTDKEEIKEWFERLLKTFSDSQITIDEIRIDGNTVTVHSTQHTPQYNQTFRVTTHDTYKDGKLVSSRFHRDEG

SEQ ID NO: 640 - protein, 120 aa, synthetic construct
DEEEDREAVKEWVHRYVEALNKKDRDALQELYTKDDSTFHVWNGQTLTDYEEIVKWLTEFASTVESVELDSIEVHVDGDTVTVHVHITFKSSNQTFTRTFHFEKTKDGFKLKEDRVQRHS

SEQ ID NO: 641 - protein, 120 aa, synthetic construct
PEEKRKEEIKELVERMVEAFNKKDIEKLKSVYTKDDSTIHIWNGQTLTTQEEIERWIKEFLKTAEHIEIKSLRIEIHGDRVTVQVHLTLRSNNVTYTSTLHFELTKDGWKLVEEHIQNDT

SEQ ID NO: 642 - protein, 119 aa, synthetic construct
PSDEEQIRELVRRLYTALNTDPDKFAELIHDDATFHISNGQTFTTKDEVKDWVEKFASNTSIEIKSIEVQIYKDGRVTVTVHFTVHTRTSTVDVTDHYHFQKTGSEWKLLEVRSHYDNR

SEQ ID NO: 643 - protein, 123 aa, synthetic construct
PSEEAEKAVRELIEREIEALNKGDWEAWVRIIHMEDITVHINGQTFKNPEEIIRWFREFISNVQLQIDSIEIHQNDNGEVTVTVHITIHTKDKTIHVTFHLHFRKENGSWKLTSKQAHFDNKE

SEQ ID NO: 644 - protein, 123 aa, synthetic construct
NDPNDVEAVQEIIRREIEALNKGDMDAWASLLDKDNSTLHFNGTTFETMDEMKDFMAKYVSNAQIRITSIEIHVNPNGTVTVHVHITIHHKDKTVHVTSTLHMRKKDGSWQIAEKHTHEDQKD

SEQ ID NO: 645 - protein, 121 aa, synthetic construct
PHDQEEVEEFLRRLYEAFNKGDIDKLRELFHPDWQYHDAATQRTYDLEEFLERVEKLTKDIHIEIKSIHIETRGDEIHVTVHVTVHNPSTKTTVTVTDHHRFERGSEQWYLVETHSQSHNE

SEQ ID NO: 646 - protein, 121 aa, synthetic construct
PSDQEAVEEMIRRMFDAMNKGDLDKLESLLDEDWTYHLEATNRTYDKDEFLEWVEKFMSHSHLEIKEIRIEIRGDTATVTVHVTVHDKRTGTTVNVTEHHHFNKKGEEWRILETRAHFNNT

SEQ ID NO: 647 - protein, 121 aa, synthetic construct
PSDEEAIRETKKRLIEAMNKGDWETLKKLFHPDAQFHLSAYQRTYDADEFIEWVRKFMKDWRITLHSMEIRQDGDEWHVTVHVQMQDRRTGTSYSVTAHDRYVRNGEEWKILESRFHFNQS

SEQ ID NO: 648 - protein, 121 aa, synthetic construct
PSDEEAIRELKKRFIEAINKNDMDTLKKLFHPDATFHFAAHQRTYDLDQFLKWVAERASHLHFQLDSIEIEIRGDQVHVTAHVTVHDDRTGRTFHVTSHDRYRKDGDEWKVIESQFHFNET

SEQ ID NO: 649 - protein, 121 aa, synthetic construct
MSDEEIIRDLLRRLFEAMDKGDMDTLRELYAPDATFHIEERNRTFDLEEFLEFFAKRTKDFQRHIESMEIQQHGDDFTITVHVTVHNRSTGKTYKYTSHFHVRKSSSQWKFKEEHLQTRET

SEQ ID NO: 650 - protein, 126 aa, synthetic construct
AHKEQQEKIKEWAKRFYEAINRKDPDAVKSLLHPDWKYHDSRTNTTYDLDEFKEIVEELAKNDVRLEVRSIEITASGDELTATVHVHFHNNSTKVTYTVTDHHRFREENGRIKIVETHSTMQSQDQ

SEQ ID NO: 651 - protein, 126 aa, synthetic construct
VDESAEEEIRRWLRRFYEAINRGDLEAVYRLLHPDWTVEFSSEPREFNLDEFKEWVEKMIRAGFKFEVKSIEIHQDGDTATVTVHVDLHNDQTKDTFKVTEHHHFALRNGTWYLVRTQIHLQPVNS

SEQ ID NO: 652 - protein, 126 aa, synthetic construct
TDPEDEKKIRDIKRRFVEAFNKGDWETIRRLFHPDAQFHFSSEPTTFNLDEFIRWVKEMIKRNVELRLDETHIEQHGDTIHVTSHLTFHFQEEQVTYRVTAHDVYQKQNGDWKIVEVHIHWDNSNQ

SEQ ID NO: 653 - protein, 126 aa, synthetic construct
AHKEDQEEIKRWLKEFYEAIDNGDADAVYSLYHPDARIDFASEPRTFNIDEFREWVERLASQGTAHELKSIEIHKSGNTIHVTVHVTTHIKSTGNTYHVTQHFQFELINGQWFLTKDEIHINNENK

SEQ ID NO: 654 - protein, 126 aa, synthetic construct
TDPSDQEAVRQIVRRFYEAFNNKDLDAIASLYHPDATFHFAEDPTDYDLDQFREWVKKFLDADIRIQIHHIEVESSGDEITVTVHVTMHNQRTGNTYHVTQHMHLRKKDGEWKVLRDEIHRDNANK

SEQ ID NO: 655 - protein, 126 aa, synthetic construct
PDPSAQEAITEWLKRWVEAVDKGDADAVASLYHPDATFHDSRNPRDYDLEEFRRWVERFARNDVQRELKSVEIHQDGDRFTVHVHFTLHNRRTGDTFHVTATFFFEKHNGQFYIVRQEVTTQQENS

SEQ ID NO: 656 - protein, 122 aa, synthetic construct
PDPSAEERIRQILNRFYEAMNRRDRDTLRELIHPDATFHDSNGQRYDKEEFLERFERIPWYRIHIDDMHIEQHGDEATVTVHVTFHIKTDSTSYTVTHHWRFVRFGDDWKIVELHVHTHNNS

SEQ ID NO: 657 - protein, 122 aa, synthetic construct
PNPEDIEAAKQIVQRLYEALNRGDWEEFKSLIHPDATFHDTNGQSYDLDEFIEMLRKRDITRFQIDSVEVRQEGDTVKVTVHGTVHRSSDPKTFTVTHHWVFVRHGDEWYVVEVHEHTHNRS

SEQ ID NO: 658 - protein, 124 aa, synthetic construct
PEDEEAIKEWLRRYFEAMNKHDVDKLLSLYHPDAQYTDTSRNQTFDYEQMKEMYESQSGQQTHIHVTHIEIQKHGDEVTVTVHVHITAHTKDRTRHIDVTYHFRFRRDGDEWKVVHVQETRRQT

SEQ ID NO: 659 - protein, 124 aa, synthetic construct
PEDKEQIKEFKKRFLEALDKGDWQKVKEMMHPDAQYTNTSTQTTYDLDQLVEMIKSNSGKETHRQVHEIHIQQESDDFTVTVHVTVHTHTPTETRTYHVTYHDRYRKKDNRWYIVEVHETTHQT

SEQ ID NO: 660 - protein, 126 aa, synthetic construct
MDSHILEEQARQIVRRFAEAFNNKDWEKLASLYHPDATFEFEETGTEYDLEEFIRWFRRLAETADIEIHFSIDEIEIRGDEATVHVTFHLTDRRTGRTTTYHSTFHVRYQDSEVKILRERITTRQT

SEQ ID NO: 661 - protein, 125 aa, synthetic construct
MSEEELKEAVKDVIRRYVEAFNNGDLDKIASLYHPDASYYDSNGQEYDKEQLIEMLEKLFRQNFEMHFQIKEIRVDGDTVTIHVEFHVRDYSRQLTFTVHRTFHLTFTDSKVYITRDEVHTENNE

SEQ ID NO: 662 - protein, 125 aa, synthetic construct
MSEKEQKEAIEETKRQFAEAFNKGDWKRLAELLHPDVRFHDSNGQQYDLEQFIRRVQKLFSQDVKMEFSIKEIRFDGDHAEVHVEFTVKHSQTGTTRWFDQTDFYQFEDSEVKIIEVRVRTVNGE

SEQ ID NO: 663 - protein, 125 aa, synthetic construct
MDEKEMTEQIKEVVQREVEAFNNGDADTWASLFHPDARFHHSNGQTYDLEQVKEMIKELVKNNVRIEFSIKEIRFDGDEAEVHVEFHYHDARTGTTQTFDQTIRMRFEDSQVKIVSKRVHTKNGS

SEQ ID NO: 664 - protein, 125 aa, synthetic construct
MSEEEQREAVKDMVRRWVEAWNNGDWEKLASLYHDDATYTDSNGQNYNKEQYIEMVKKQASQNLKLEFSIKEIRVDGDTITIHVEFHITDDRTGTTVTFTSTFHLTFYDSQVKITEQRVHTHNGQ

SEQ ID NO: 665 - protein, 123 aa, synthetic construct
SEAEEAVRDMIRRWVEAWNTKDVDKLSELYHPDATFHHQNNQTYNKEDFRRRFEQLASSDFKIEVKSIEIQIDNKDEVTVTVHFTVTYEDTQTTTNITSTFFLRRENGRWKIVEERESRNQQQ

SEQ ID NO: 666 - protein, 123 aa, synthetic construct
PNLEEAVRQVLREYFEAINNGDVDRVMSLYADDARWHTNNGETYDKEDLKRWYEEFASIPFHIEVKSIHIQINDDTHVTVTVHVQITHPETGRTTDVTATFHMQFQNGSVKIKEVHTHHNDHS

SEQ ID NO: 667 - protein, 123 aa, synthetic construct
SSAEEDIRQVMRRYFEALNKRDADAVASLLDDDWTYHNSNGETYDKEQFREMVERYASIRFKIQITSMEIQINDKDSATVHVHATVTEEDTGRTTDITETHHLVRKNGSWKIIETHVHRNDRQ

SEQ ID NO: 668 - protein, 123 aa, synthetic construct
SEMQEAVREWLKRYYELFNQRDWEKVASLYDDDARFHHNNGETYNKEDYERRLQSLASLDFTLQVHEIRVQIIDDTQATATVHVTYTNHHTGETVRITQHFFFRVENGQWKIKRDEEHRNRQE

SEQ ID NO: 669 - protein, 123 aa, synthetic construct
SEMEEAIREVMKQLYTAFNTGDAELVDRLLHDDWEYHHQSGNTYDKEDFIKMFEEMASIPFRIQIDEMHIQIIDDTRATVEVHATITFESTGTTQHFTEEHHLRRKDGSFKVVETRVHTNDQQ

SEQ ID NO: 670 - protein, 123 aa, synthetic construct
SDDEDAAEELARRFYESFNKRDWEKFARLVHDDATFTQNNGQTYDKEQLIEMFKSMASSRFHVQIDSLEVRIIDDTRVQVTVHVTVTFEDTGTTTHATHHWFFVKENGEWYLVHLHERRNDRQ

SEQ ID NO: 671 - protein, 123 aa, synthetic construct
SEAEEAIRDVIRRLVEAFNNRDAEKVKDLYHPDATVHHNNGETYDKEQFIERFKELASFNFQIQILSQEIHIHNDTEATVHVQVQITEDDTGRTTDVHSTFHLRVFNGQWKIVEEHINRNDQS

SEQ ID NO: 672 - protein, 123 aa, synthetic construct
SELQEKIKEFKQRMVEAFNNGDLDKISELVHPDVTFHHSNGQTYDREQFIKMVERMLSSRFHIQIKSMEIRIEDDTHVTVTVHLEVHFRDTGTTVEVTAHDHYRFENGSLKLVEVQIHRRDRS

SEQ ID NO: 673 - protein, 124 aa, synthetic construct
PHDEEEIREWVKRFIEALNRGDLETLDRMLHPDWRFHNNKTGRTFSREEFKEMVERMKSNNTRVELKELHVEIKDGHVTVTVHLQFHTNHNGQTKTVDVTEHHHFRRSNGEWKLVETHATFHEH

SEQ ID NO: 674 - protein, 124 aa, synthetic construct
PSDEEEIREWVRRFVEALNKGDMDKLKSMLHPDWRYVDDRTGQTYDLEEFAEMVKKLKSHGMRIEIKSLEVEVKDGTATVTVTVQVHTTHNGQQYTTTFHERHHFEKRNGNWYLIRTEVTVDHH

SEQ ID NO: 675 - protein, 124 aa, synthetic construct
PSDQEKIKEWLRQFFEAFNRGDMDKLKEMLHPDWRYHNSNEGRTYDLDEFKEMMRQMFSNGIRLEVKSIEIHIHNGTATVHVEVDAHQTHNGQNKTVKFHETHHFDKKDGRWFLIRTEVTTHET

SEQ ID NO: 676 - protein, 124 aa, synthetic construct
PSDEEDVRDIVRRLIEAFNKGDLDALRELYHPDARFHNDKTGQTYDLDEFIEMVEKLASNGTQIELKSLEVEVKDGHVTVHVHVQFHTTHNGQTKTVDVTRTIHFRRSNGEWKIIRDKATFNER

SEQ ID NO: 677 - protein, 125 aa, synthetic construct
DEEEIKKEIKKLIERFVEAMNRGDMDAIDSIYDDDATYTHASGQTYGKEAFKRWVKEFLEKVEHIQVRSLEIEIRGDTATVHVHMEVTFKEDNKTYHFTSTFFFRKKNSTWYLSSERVTTQQDDG

SEQ ID NO: 678 - protein, 123 aa, synthetic construct
AGKEAEEAIRDIIRREAEALNNKDYDTWKSLFHPGAQFHISATGQTYDLDEFVELMRKVFDPKRMEIKSIEIQTDGDEATVHVHFQVTHRKHNTTVTVTATIHVRRSNGQWYIVEKHIHFQPT

SEQ ID NO: 679 - protein, 123 aa, synthetic construct
AGEEAEEAVRQWLRRFYEAINNKDMDKMKSLYTPGSTIWISDTGTSYDVDEFIEFFEKFFTAKRLEIKDMHIEVSGNTATVTVHVQVHLESTQQTYNVTQHFHFRREDGTWRLTEDHIHVQPT

SEQ ID NO: 680 - protein, 123 aa, synthetic construct
AGDELKEAVKEWLERFYEALNKNDMDALRELFHPGATIYDSSTGTSYDIEEFLERFEKIFKMTRIEIKSIEIHTSGDTATVTVHVEVHFSRSNQTYRFDHTWHFERKDGTVRLVELRERMHST

SEQ ID NO: 681 - protein, 123 aa, synthetic construct
SGEEAEEWVREWVKRFFEALNNKDMDALKKLFHPGAQFHDASTGTTYDLDEFLEMLEKIYQFYRIEVKSLEIEFDGDTVTVHVHWTGTREQSNQTYDATTTFVFERKDGTWRIVEVHIHFQPT

SEQ ID NO: 682 - protein, 125 aa, synthetic construct
PEDQEEIKELKKRFLEAFDKGDMDTLRSLIHPGAQFHDSTTGNTYDKEEFLQRVAEFTSNVEIHRQVDRTEIQQHGDEYKVTTHVTVHFTHNTKTQTQHVTSHDRYRKDGDEWKLLESRFHFQQT

SEQ ID NO: 683 - protein, 123 aa, synthetic construct
PHPEDETKIREIKKRIAEAMNRGDMDAIKELFDDDVTFTHESGQDFDLEEFLDWVKKLTSTADRIEVEIKRIEQHGDHVTVHVTVTVTNSSTGTTTDFHATDHYQKKDGQFRITRTHFTTRDT

SEQ ID NO: 684 - protein, 124 aa, synthetic construct
TDPDAQEAVREWIKQFVEAFNNNDMEKLKSLYAEDATIEHSGGQRFDYEEFIKRVERRIRNSTFHLEFEIKHIQETTDEVTVHVQFHMHEEDTGRTFTYHSTFHFRKTDGGYKLKSEQIHRHQT

SEQ ID NO: 685 - protein, 123 aa, synthetic construct
DEKQEELVRQALTREIEAFNTNDMDKWASLFAEDARFHNYTGQTFDLEEVKEMIKQMLSNTRLRFELHIISIEFRGDTVTVHTTLHVTDESTGRTTTIHQTIFLKIDDDDVRIKEKHVQEDST

SEQ ID NO: 686 - protein, 128 aa, synthetic construct
PVDPTDEEAIRQWVRRFMEALNNNDLDKIRSLYAPDAQYHNASTQRTYNLEQFLEYLEKFLPGTHFEVKSLRIELRGDEITVEVHVTVTVHHKDKTVDIDVTRHFHFRRENGSYKLVRDQAHWDSKEK

SEQ ID NO: 687 - protein, 121 aa, synthetic construct
PSMKELVEEWVRRFVEAINKNDMDALKRLYTPSDSRVHFDNRTFETPDEIKEWFRQHAENAKLEIKSIEIHTSDNEVTVHVHVTVTNDRTGKTVDVTRTLRFRIEDGSVKIKEDRVHRHDT

SEQ ID NO: 688 - protein, 126 aa, synthetic construct
SDDEAREAVKRLLRRYYEAMDNGDWETLLRLLDDDWRYHDESGETITTREQFRERVERQAQHPTHRQIDSIEIHQDGDQVHVTVHVTQHHEETGTTVKVTDHHTFTRKNGQWRITRTQSHRDPRQS

SEQ ID NO: 689 - protein, 128 aa, synthetic construct
DEEKEAKEWAEEWITRYYDLLDKGDWEAVLSLYDDDATIHVYNGVTYTSKESIEEFIRRWISESQNARHEIKRIEVEVRNGTVHVTVHVQVHNSSTGQTFDVTQHFEFRKEGDNFKLKRDEIHRRDTT

SEQ ID NO: 690 - protein, 128 aa, synthetic construct
DEEDESREAIKEIVHREAEAFNKGDWETWLSLFHDDATIHIQDGETLTTKEQIRRWFEEVRKQAQFSSIEIKSIHIEVHNGTYTVTVHFQVTDSRTKRTYDFTQHIVFVRHGDEWKIVEKHIHRRDTS

SEQ ID NO: 691 - protein, 128 aa, synthetic construct
PEEEEDKEQIKEWVKRWVEAMDKGDFDTLRDLYHDDATIHIFNGETVTTKEQLEEWLRRVLSQSQFSKREIKSIHVEIHNGTATVHVHGEVTDSRTGKTFKVTSTFHFEKHGDRWYLVSQHLTMHDTS

SEQ ID NO: 692 - protein, 124 aa, synthetic construct
PVNEEEAKEQIRDWVRRYIEAINHGDLEAIASLYHDDVHWWARNQNKEELKRWYERFLRRFPDVRIEIKDLHIEIRNGTATVHVHVQVHFPGQNQTYDVTTTFFFEFQNGQIRLVEVRTDNQPT

SEQ ID NO: 693 - protein, 124 aa, synthetic construct
PINDEEVEEALRQLYRRELEAFQKGDIDTWASLFHPDATFEGRKLDYEQMVEWFERILRTFPTMKVELKDMHIEVKDGEFRVEVHVQFHVEGTNRTFNVTFHDFIRVRNGEFQIVNRQMHQNDT

SEQ ID NO: 694 - protein, 124 aa, synthetic construct
PINEEEQREQIKEWVERFVRAFNSGDLETLDSLYHDDATFDGTGTSKEEFKRWIEEFLRRFPDARMQVDHLEIRFKDGEATVEVHFTVHVPGKNITFHFTSTFFFKFENGQMKLTNEEVTRDTS

SEQ ID NO: 695 - protein, 128 aa, synthetic construct
PSPEDEKTIREWVRRFIEAFNNKDLDTLVSLFDEDWTFHDANGQTFTTLDEFREWMERVLRTFQDAKMQLDDLEIRFDKDHATVTVHITIHDSDSNTTYHVTEHHHFRKDTSGWKLLETHVHTDQQPT

SEQ ID NO: 696 - protein, 129 aa, synthetic construct
ASEQEIREAVKEFKRRLVEAINKGDMDTIRELFDSTDSEMHIWQGRTYHDQDEIAKWFEEFRKKFEVEIHITNIEIHIRNNTEVTVHVHFHVTDRRTGKTFTYHATDHYRFEGDTIKLKESRFTRDEHR

SEQ ID NO: 697 - protein, 125 aa, synthetic construct
AHPEQQEKIRQIIQRYFEAMNNKDADKLISLIHDDWTYHDSSGRTFHNKEEFKEWVEEFLSKFDVRFEVKSIEIRLDDSTQITVTVHVDVTHTGTNQTFKVTEHHHFRLKDGDWKMVRTEVRTDG

SEQ ID NO: 698 - protein, 127 aa, synthetic construct
PEEEEIKEIIKELKKRLVEAFNKGDLKTLRDIFHPDATFHDSNGETLTSLDEFIEWVKEWLRRFDTNLQITEIRIEIKSKDEATATVHITVHFEDGTTYTFTFHDRYRRHGDEIKIVESEIRTNNTG

SEQ ID NO: 699 - protein, 127 aa, synthetic construct
PREEELKEQVEEIIRREFEAFDKGDWETWLSLFHPDATLHDSDGTTFTTREELRRWFESLRKRTDTAHQIDEIRFEIKSKDTITVEVHVTVHTSEGKTYTFRAEIHLTRHGDEVYIIEKRLHTHNTG

SEQ ID NO: 700 - protein, 127 aa, synthetic construct
PKEEELKEQVKEVLRRFYEAFNKGDVDTLAELVHPHATFHFSNGETIHSRDEFREWFKEFKKRLDFRIEIKEIRFEIKDETNITVTVHVQFHRQNGQTFQVTEHHHLRRHGDEVKIIETEFRFNNTG

SEQ ID NO: 701 - protein, 119 aa, synthetic construct
DDDQQAVKKLKKRFVEAFNKDPDAVAKLWHDDSQMHDSNGSTFNSQEEFKEWVTRLARHAQIHVDSIEVHSRPDGTIEVHVHMTIHRENDTYTVTATDVYRKKDGSYQIVESRFRVHQT

SEQ ID NO: 702 - protein, 119 aa, synthetic construct
PSDEEAIREVIRRFYEAFQTDIDDLASLYHDDATMHLWNGRTFTTKEEIKEWFERLARTTDVHIDSIEVQTNPDGSVTATVHVTTHITNSTFHVTQHIHFRVQDGDWKIIRDHIHEQPS

SEQ ID NO: 703 - protein, 118 aa, synthetic construct
MSEEQIKEWVKRYFEAYDKGDWETLVRLVDDDWQFHQNSGETIHSREQFREWVKEFLERFQDTAHQIDDLEIRGNTVTVHVTVHVNMNGQTFTIHVTEHHRFEGNKLKETHQHTNQQD

SEQ ID NO: 704 - protein, 126 aa, synthetic construct
PDPRAIEQIKEWLKRFYTIINTGDWEKLAEILDEDWTYHDSSGQTYHDLEEFAEWVKEFNKQNFHMEIKSIEFRQDSRPGYYHVTVHVTVTQEGTGRKFDTTDHHTFRFQDGSIQLVSTQVHWRET

SEQ ID NO: 705 - protein, 126 aa, synthetic construct
PEKELQEKAKEIKRQLVEAFNKGDWELVARLVHPDATFHHSDGRTFTTLEEFIEWVKQWSSQNWEIEIKSLEARVLPDEREVTVTVHYEVRNQTDPKTFRATTHDRYVFKDGQVYLIESRTQWHPL

SEQ ID NO: 706 - protein, 124 aa, synthetic construct
DEPEAQEEIKEIVKQLLEILDTGDWEKLSSYYHEDATFYYNGRTFHTREEFTEWVRQFASNQSHHQIHSIEIHKDGDEYEVHVHVTVHFRRDPKTFKVTSTFRFRQTKDGLKLLEERVHRDDGQ

SEQ ID NO: 707 - protein, 128 aa, synthetic construct
MSEEEMREALKEWFQRWAEAFNRGDMDALKSLYDKDAQMHISGQTFDNPDEIKEWFERLFRQNVKIEIKSLEIRMTPDSTTATVTVHAQMHNETDSTTWHFTAHFEFTFEGDTLKLKRQQTHIHQDDK

SEQ ID NO: 708 - protein, 128 aa, synthetic construct
PSEKEIEEAIRELLKRFYEAINKGDWEKVARLVDKDWTFHYNGRTFTSWEEFVEWVKEFFKQKFRIQIDSIEIEIDSDQNNATVHVHLTVHNEDNPVTRHTTDTHHIRYEGDSFKFVETRVQMHQDDT

SEQ ID NO: 709 - protein, 128 aa, synthetic construct
TSTKEAEEAIREFKKRYVEAFNNGDMEKLERLIHPDATMHVSGQTFTSRDEIKEWLEEMIRQQWQMHVDSLEIRQEPDPTHFTVHVHVTFHLDRNPTTVHATQTDHYRLKDDSFRIIRMQVHFHQDDT

SEQ ID NO: 710 - protein, 128 aa, synthetic construct
MSEKEQEEAIREWKKRFVDAVNTGDMDKIRELVHPDARFEVDGQEFNNIDEFLEFIKQFFREQWRIHIKSLRIEFDEDSREVTVEVHLEMRNERNPTTVEATFEDHYRFKDDTLKLIETRVQRHQKDT

SEQ ID NO: 711 - protein, 127 aa, synthetic construct
MSEEEMIEAVRQWLRRFYEAIDRKDLDALARLFAPDATMHIAREQREFDWEEIVRWFERFLKTFPRTAHQIDEQEFHIHGDTITVHVRVTVHFQDTGTTVEVRDTYFFEFENGELKLRRRESTFHQK

SEQ ID NO: 712 - protein, 127 aa, synthetic construct
MDRSEQEEQIRQFKQRWAEAWNKGDLDTILSLLHPDVTFHFASYQRTYSYEEYREFFERFQKRFPNARLEIKRMEIEFHGNEVTVHVHFTVTYPDTNTTVDYTTTDRYRFENGELRLLESRTQAHQN

SEQ ID NO: 713 - protein, 128 aa, synthetic construct
DEEEDREEIKEWKERFLEAIDKNDMDKLRELLHPDATWYNGKHPQESTLEEVLEWLRQFWETFKDTAHQLDSLEIRFSDNTATVHAHVTVHFHHNGQRYTYRVTATDHYVKRGDEWKLVRSEEDRRQS

SEQ ID NO: 714 - protein, 130 aa, synthetic construct
TSEEVKEHITEVVRREIEALNNGDMDTWRSLFHPDATVTFKSEQRTYHLDQVVEMIKEFLERYPDTHMEIKDLHIEQDGNTVTVHVHVTIHVRHKDGTITIHVTATIRFRLKDGDWQIVHKTVERHQEDH

SEQ ID NO: 715 - protein, 130 aa, synthetic construct
ASEEDQREVREIIEREVEAFNKRDLDAWMSLFHPDARMTVAAHQQTYNWEQMRRWFKTFLDQYPNTHMEIKDLHIDQSGDEITAEVHVTLHITNKDGQVTIHVTATIHFRKINGQWFIIRKEVHMRQEDT

SEQ ID NO: 716 - protein, 130 aa, synthetic construct
PSKEDQEKIKEIIQRELEALDNKDLDAWFELFHPDAQVTDSRTGTTYSAEELREMVEEWLKKAKDTAHELKSLEIEQDGDTYHVTVHVTAHVHHKDGTVTYHFTAHLTFEKRNGQFYIISKHVTTRREET

SEQ ID NO: 717 - protein, 130 aa, synthetic construct
ASKEDQEDIRELINRFFEAINRNDVDAVKSYLHPDATFHFASEQQTYDLEQFRKWLEEFMSHFKDTRIEIKSMEIQQSGNEATVHVHWTLHAHTKDGTFTIHGTTTLRLRKENGKWKILEVRISIDRQKT

SEQ ID NO: 718 - protein, 130 aa, synthetic construct
ASEEDKEEIRQIKQRLFELFDNNDADALRSLFHPDATFEFEESQTKYDLDQFKEWVKQFFRTFQDIQHEIKSMEIEQHGNEIHVTVHVTLHITFPNGHVTIHATYHDRYRLINGNWYIVETTVTFRQEDS

SEQ ID NO: 719 - protein, 126 aa, synthetic construct
THEEAERQARETVRREFEALNHRDIDDWASLVHDDAEFHYESSPQTYNKDEFREWVERQLKSWSSFRIEIKSLHVEQRGDEYTVHVHVTVHFDETKTTTHFDFTIHMRRKDGEVYILEKHIRTHHE

SEQ ID NO: 720 - protein, 126 aa, synthetic construct
TDPEQEEKIKEWLRQFYEAWNRRDLERLAELLAPDWTYHSNDGNTTYDKDQFKEMVEEFMRKFSRFRLEIKEVHFEQRGDHVTVHVHAQVHNPQTGTTTHTTDTHHFRFENGQLRLTHTHSTTYHS

SEQ ID NO: 721 - protein, 126 aa, synthetic construct
THKEAYEEIKEIVEALAHAFQTRDLEKLKSYYTDDAQITFSDGNQTYNKEEFARIVERRLRELSDFRVHLTSLEVEQRGDEFTVHVRFQMHNNSTGETYEFRSTIHIRRENGRWKILSEKITTHKT

SEQ ID NO: 722 - protein, 126 aa, synthetic construct
TDPSAREKIKEWLERFYTAWQEGDLDKLESLLHPDAKFHSGNGNQTYNKEEYKEMVERFMKSVRSYRVQIDSIEVHQDGDEFHVTIHVTFHNDDTGTTVRVTNHDRFRFKDGDLKLVEHRSTHHHE

SEQ ID NO: 723 - protein, 119 aa, synthetic construct
PSDEEAAREIVKRFAEAFNTDPDAVAELIHPDATVHIYNGTTLTTKEEIKEWFTRLISNTRIEIKSIEVHKNPNGTVTVRVEWTMHRKDQTYRGTTTFFIEKRDSEWYILEVRIHVQPT

SEQ ID NO: 724 - protein, 126 aa, synthetic construct
GDPSDEEEIREILKRFYEAMDKGDMDLIRSLLHPDVTMHLPNGQTFTNLEEVIEWIERFHRNFPHHRSLDSIEIEIRGNTATVTVHVTIHFPGENQTFHVTHTWFFRKKDDTWRIVEMREHRDDKG

SEQ ID NO: 725 - protein, 126 aa, synthetic construct
MDKDDKEEVKQFIERYYEAYNKGDIDALAELVHDDAQFHYNNGETLNSKDDFREWVTQLLSKFPSQVHIHSIEFRASGDEITVTVHVTVHHDGSGQTVHVTDHYIFRKEGDRWKIVQVHSHRDTRD

SEQ ID NO: 726 - protein, 128 aa, synthetic construct
PSKETEEALREWIRQYIRAINERDVDAIHSLYHDDSTLTNQSEGRTYDAEEIREMYERFLKTFPRTTLELKDLHIEQRGDTATVTVHITIRFWGEGRHVDVTYHFHFRRSDGPFKLVHVQVRADDKHS

SEQ ID NO: 727 - protein, 128 aa, synthetic construct
ASKEDQEEIREILEREFRIWNNHDLEAWEELLDKDVTVQYSDTGTRYSADEVKEMIEEILRRFPDARIQIDDMEIRQDGDEYTVHVTYTVTFTGTGQNITFHATFFFRKSDGPWKVISKQVRVDRRTQ

SEQ ID NO: 728 - protein, 128 aa, synthetic construct
PSDKAEEDVRQVVRRLVEAFNNHDLDALDEIYAEDVTWHDSRTGQQYSKDEFRERVERIMKTFPSMHIEVKDLHIEQRGDEVTVTVHYTQTFTGTGRQSNITSHFHLRQKDGEWKIVREHVTTDDSQT

SEQ ID NO: 729 - protein, 128 aa, synthetic construct
PSKEDEERIREWVRRFYDAFNKHDFDKIAELFHPDSTYHDSRTGTTYDYEEFLEMVERFLRTFPDFRMEIESLRIEVRGDHYTVEVHFTVTFSGHGDNVRVTDTYFFRKKDGPFKLVEMRSNIDNVRT

SEQ ID NO: 730 - protein, 128 aa, synthetic construct
AGEEDREAIKDLLRRFYEAIQKNDMDKLRELLHPDARFHDARTGQTYDKEEFLQRVQEFWERFQDINVEIKSIEIDADGDTITVHVHVQFHVNTPTRTQTFNVTETHRIEKHSNDYKIVETHIHTNQT

SEQ ID NO: 731 - protein, 126 aa, synthetic construct
SSEEEMREKIKDVKTKFIEAMNKNDLEALAELVHPHITLNSANLHTRDEFKKWMKEWLEKFSDAQIQVDEMHIQINSKDTATVTVHVTVHNKSTGVTFKFTAHDVYRFEDGSVKIVSSQIHTDNGS

SEQ ID NO: 732 - protein, 126 aa, synthetic construct
SSEEEMKEAIKEFKKRLAEAFNNNDLDKIRELFAPDVTLNSANAKNLDQFVEWVERWLSDWKDFNIQITSIEIRIDSKDTATVHVTFQVTDARHNVTFTFHATDVYVFKDGSVKIKSVEIHTDTRS

SEQ ID NO: 733 - protein, 126 aa, synthetic construct
MSEKEMEDQIREVLKRFYEALDKHDLDTLDELLHPDWQLDSQNLTTREEVQRWFTKWLSEFKDSNHQIDEIRIEIKSKDTATAHVHVTVHDNSTKQTFHVTETHFMVFKDGSVKIVRTRVHRDSGS

SEQ ID NO: 734 - protein, 126 aa, synthetic construct
MSEEEMKEAIKQVIERFYEAFDRGDMETIARLVDPHVTNRSRGIKNREELIEHLKRLVEEFKDVNHEIKEVRIQIDSKDTATATFHVQQHDSRTNTTYRVTDHYFLEFKDGTVKIVSVQSHTDTGS

SEQ ID NO: 735 - protein, 126 aa, synthetic construct
MSEEEMERAIRETIKRFYDALQNNDRDKLRKLVSDDITLRSSGATTKEEFIKWFEEWLKTFKDFHVHIESLHIQINSSTSATVTVHVTFHNSSTKVTYHITDHYFVRFKDGSIKITHVQSHTDSQS

SEQ ID NO: 736 - protein, 125 aa, synthetic construct
PDPRDEEAVRDMVRRMYTALNNKDADAVRELVHPDSQFHIYNGRTFNNAEEFTEWVKEWLKNDARVEIKSIEVRQDDDTRITVHVTVEIHYKHGPHTFTFHHTWFFVKINGSWKIKEVREQRDSS

SEQ ID NO: 737 - protein, 124 aa, synthetic construct
PEEKEIEEAIRRLLERYYRAMNNGDHDALKKMLHDDWQMHIDGQTYNSKEEFEEWLRRMLSQGVRLEIKSIEIHVKDGTATVHVHVQFHNSSRPQTFTVTETHHFRRINGQWYLIRTEIHRDSN

SEQ ID NO: 738 - protein, 124 aa, synthetic construct
PEEEEAKEKIKEFKHRVIEAINTGDWEAIARLFHPDAQMEVNGQQYDDLEEIIRWIQRLHSQNVQIEIDSIEIETRNGQYHVTVHVTVHRRNNPQTYTVTFHDVYRFKDGSLKVIRTEVRTDSN

SEQ ID NO: 739 - protein, 124 aa, synthetic construct
PEEEEAKRAAKEILERFFEAMNKGDWEALERLFHPDAQMHVDGQTFNSQEEIRRWFERWFSADVQIQIKSIEFEIKNGTITVRVTWDAHNSRKPQTFTFHTTVHLEQQNGSFKITRMEIHTDDN

SEQ ID NO: 740 - protein, 126 aa, synthetic construct
MSEKEMEEAIRDWLRRWFEAWNKKDMDTLKELYAPDATFQHSNGRTFRTLEEIMEWFKQMLDQDVKVTLHSVEFRMHDETHATVTVHMTFTNDQTNTDVKATAHFHFQFDSTSVKLKRQQVHEDST

SEQ ID NO: 741 - protein, 126 aa, synthetic construct
YSEEEAKELIKEVIKREFELLDSGDLDAWLSLIHPDATFHDSNGITFTTLEEIAEWVKQMFEQNWRHRITSIEIRVDSKDEVTVHVHVKVQQESTGRTRDVTFTDRFRFDKDSVKIIERQVHYDST

SEQ ID NO: 742 - protein, 120 aa, synthetic construct
TDESDIREWLKRFYESINKGDLDAIEELFHPDATMHLSNGRTFTTLEEIKEWFERLAKRFDIKVEIKEIRIDGQTVTVHVTVTRTHRSGKTQHMTVTDHYHFEGKKLVEMRSHFDTKDQT

SEQ ID NO: 743 - protein, 120 aa, synthetic construct
AHEEEIRELLRRYYDAWNKKDVDALAEIFHPDATFHHSNGQTFTNREEFREWAERFMKRFDMQIEIKEIRVDGQEATVHVTMHFTHSDGSKQTARVTEHHRFRGKRIVETHQHIDMRDVT

SEQ ID NO: 744 - protein, 120 aa, synthetic construct
ADESDAREWIKRFFEAFDKGDLDALAELVHPDAEIHVPEGITFTTKDEFKEWVERLFKRFEFHHEIKEIRADGNTVTVHWTLHVTHSNGETYTATGTTHLRFEGKKLVEMHIHVDMKKVT

SEQ ID NO: 745 - protein, 127 aa, synthetic construct
MDEDELKEAVERTMRRFYKAFDEGDADTAASLVHDDWTYHQSNGETLTTREELKQWVEEWFKQFPDTRREIDSIEIRVGDETEVTVTAHFTVHFTHSNQTRHTTDTHRFQFQNGSVKVIETRSHENG

SEQ ID NO: 746 - protein, 124 aa, synthetic construct
MSEQEAREDIKDIIRRFIEAINKGDMDKVRELYHPGATLHIDSGVTYTTLDEIIKWVAELASNNLRIEIKDMRIEQNGDRATATVHVKVTNESDKRTVDVTSHIHFERTNNGFKIVEEHVNTQN

SEQ ID NO: 747 - protein, 124 aa, synthetic construct
YSEKEAREQIEEIKRRIIDALNKGDMDAIKSYFHPGATMHIWNGQTFTDLDEIKRFFKEMHDNNFKFQLDEIHIEFKGDEATVTVHVTVHNDSNPQTYTVTAHDRYVYTNGQWYLVESRFHMQD

SEQ ID NO: 748 - protein, 124 aa, synthetic construct
MSEQEIREDIEDIIRKFYEAINKGDMDKLRSLFHPGATFHDANGTTFHDLEEIVRWLKQIFDQGWELEVKSLEIEIRGDTVTVRVEVTMRNRSDKQTYEVHDTYFFHRSENGYKIVRVESRIQD

SEQ ID NO: 749 - protein, 126 aa, synthetic construct
PGEEEIKEAIKEFLRRFYEAFNKGDLDALMRLVHPGVTFTQDNGRTFKTMEELREYFQKLIENNFRLHIHEIRIEIKDGTATVTVHVTIQQQTTGKTVRVDHHWFFRVEGNRVKLVEVRSRTDDDN

SEQ ID NO: 750 - protein, 128 aa, synthetic construct
DKEKKTREQIEDFKRKEVEAINRKDLDKIKEIIKDAQYTNSDTNTTYDADEFVEMVEEWARRFPNAEIHIDSIEIHIDPKGDHATVTVHVTIHYKDTGETRHVTYHDHYRQEGDELKLVESRFTTTNG

SEQ ID NO: 751 - protein, 128 aa, synthetic construct
PDEEEQREQIKQWIERFYEAMDRGDWQTLKELIGDATFHNTDTQQTFSADEFIERVRQFQSQFPNVHRTMVSIEIRFDPRGNHITVHVTVEVHIGETKQTHRFDNTDFFRLEGSQWKLVHHRFTTRGG

SEQ ID NO: 752 - protein, 129 aa, synthetic construct
DTEKMEQDIRELIRRFFEAFNNKDADAMASLLHDDAQIHFEEDKKTYDKEQFREWVERVLRRWPDTKVQIDDLHIEITKDHVTVEVHWTVTFNRNGKTHHYHGTTTFFFRLKDGQWRIVELRFHLESRD

SEQ ID NO: 753 - protein, 129 aa, synthetic construct
DGGEAQEQIKELVERFYEAFNRKDVDKAMSLVHPDATFHFEEDPKTFDKEEFREWLERFIRTFPSHQLDIDSIEIHIDKDHATVHVHVTVHVNKDGKTYTYHFEETHHFRLVNGQWYLVETHIRYEERG

SEQ ID NO: 754 - protein, 129 aa, synthetic construct
DSGKAEEDIRQIKRRFIEALNRRDVDAFMELVHPDAQFHFSSDPKTYDKEQYREWLERFFRTFPRVHIEIKDMEIRVDKDHVTVTVHVQVHVTQNGKHETYHFTYHDHYRLKDGTWQFIESRVTTDQTD

SEQ ID NO: 755 - protein, 129 aa, synthetic construct
DSGEMQEAAKEVVKRLVEIFNRNDADAFASLIAPDWRYYDSRDPKTYSIEEFREMVKEFASRFPDTKVQIKDMHAEVTKDHVHVTVHVEVHLNQNGKTTTTHVTEHHTLRLENGSWKVVSTRTTMETRE

SEQ ID NO: 756 - protein, 129 aa, synthetic construct
DSGEMQSAARELINRFYEALNNKDWKKIADLIHDDFTFEDSRDPKTYSREEFIEWVQRWMKQFPDARLQIDSQEVRVDKDHVTVTVHVTMHTNHNGSTITFHITHHWFFRLENGQWYIVRLRETMESRH

SEQ ID NO: 757 - protein, 125 aa, synthetic construct
PSEEDERAIREIKKQLVEALNNGDADRFASYYHPDATVHTSEGRTFTTREEIKEWAKQLFSNNIRIEIKSIHIDRDGDRATVQVHVQFHNSNTGTTVDFTAEDHYQKKDGDFRIVEVHIHRDNGG

SEQ ID NO: 758 - protein, 125 aa, synthetic construct
PSEEDQRAAKDIKRRLVDALNKGDADTFASLFHPDARIHFSDGTTLTSRDEIREWVKKFFSQGWHIEIKSIHVDQDGDEFTVTVHVHLHQERTGRTFTVTAHDRYRVKDGEWYIIESRFHFDNGG

SEQ ID NO: 759 - protein, 125 aa, synthetic construct
PSEEDEKEIRDIIRREVEALNKGDADAWASLFHPDATYHLYQGRTFTTREELKEWIERFTSQGVHIEIKSIHITQDGDRLTVEVHVTYTNDSTGQTFHMTFTDHFQLQNGEWKIVERHVHVDSGG

SEQ ID NO: 760 - protein, 125 aa, synthetic construct
PSEEDQRAIKEILKRLLEALNKGDADALLSLFHDDWTLHINNGETYTTKDEFREWVERFFSQNFEVQLDSVEIRQDGSTFTVHAHFTVHNRNTGQTFRVTETHHFQKKDGQFYIIETHTTHDSGG

SEQ ID NO: 761 - protein, 125 aa, synthetic construct
PSKEDEEAIRDLLKKFYDALNNNDLDKLKELLHPDWTYHSSDGRTFTTKEEFAKWVEDLWSQNFKFDIDEIRITQDGDHFTVHVHVTMHDSRTGRTVHATDTHFFRKKDGQFYLVETRTHWDNGG

SEQ ID NO: 762 - protein, 125 aa, synthetic construct
PSEEQKEKIKQWYERELDAFNKGDADAWASLFAPDATMHLWNGETFHDREELKRWFEQMISNDIKIQLDSVEIHVDGDEVTVHVHFTFHNDRTGQTFHVDATDRFRFENGQLKLIERHVRRDNGG

SEQ ID NO: 763 - protein, 125 aa, synthetic construct
PSKEDEEAIREILKQLAEAFNKGDADAFASYFHPDATFFDHDGTQHNSREEIKEAVKKLFSQQFRVQLDSVHIDLDGDHFTATAHWTFHQERTGRTFTVTTHVRFRKKDGQWYIVEFRMHLDTGG

SEQ ID NO: 764 - protein, 125 aa, synthetic construct
PSEEDERQIREFDRQRLEAFDKGDADKVKELFHPDARIHFYDGRTITNAEELAEWVKQFASNDVKRIIHGQRIEQDGDEFHVTGHFSLTDSRTGKTVRFTYHITYRKKDGTWKIIRMEVRVDEGG

SEQ ID NO: 765 - protein, 120 aa, synthetic construct
PDESQIRDFKRKEVEAFNNGDMDTLRSLYDEDARVHTSQEQVTYTTRDEIVKHFKELLEKFPDMRIEIKEIHVDQDHATVHVQVHTTQDGKPVTFRVTVHDRYKDGKLKETQFDIDNHPD

SEQ ID NO: 766 - protein, 120 aa, synthetic construct
PDESEIRDWLRKYYEAIDNGDWETVASLFHDDATVHYSKYQVTLTTKEEITRFIRRFFSRFRNSRHEIEEIRFDQDTVEVHYTATYHQDGKTTHRRATDTFHFKDGRLVEVRSHWDDVPD

SEQ ID NO: 767 - protein, 125 aa, synthetic construct
DKEDEAREAVKEWVRRFVEAINNKDVDAIASLYAPDATMHINGQTFNDWEEIRKWFSQWASRADLQIHVDEQEIHITDNTVTVHVRMTIRNKSDPTDYEYHSTFHFTKEGNSWKLKEEHVHSRQL

SEQ ID NO: 768 - protein, 125 aa, synthetic construct
DEDEEIQRAVKEIIKRLYDAFNNKDLDALRELITPDWQNHTNGQTFTDLEEVVEWIERYLKTFDTRLQIDSMEVETSDNSATVHVHVTAHHPEDPKTFTITETHHIEKNGSQWRLVETHVQSHEQ

SEQ ID NO: 769 - protein, 127 aa, synthetic construct
DEEEMRQKVKEMVERHIEAFNKGDLDKLESLYHPGAQFHDSRDPKTYDLEQYKEMVKELFKANVKMQLDSIEIRINGSTEATVTVHVTVTNDSTGTTYRATRHIRFRFKDGGLKIIEDRATFREQKS

SEQ ID NO: 770 - protein, 127 aa, synthetic construct
DEREMEEAARQTIEREIRAFNRGDLDTWASLFHPGAQFDDSRDPKTYDLEQMKEMIKELIKANFRLELKSLEVRIVGRTEATITVHVTITQDQTKRTYQATFHFHIRFKDGGWKIVKKEARYREQKS

SEQ ID NO: 771 - protein, 127 aa, synthetic construct
PEEELKKIAKEAVEREFEAFNKKDMDTWRSLIHPGAQYHDSRDPKTYDKEQLTEMVKELLKADFQLEIKSITIEIEGRTHVTVHVHFHMTQPQTGRTYTVTTTIRFEVRNGSVKIVEKRTTTRQQDS

SEQ ID NO: 772 - protein, 126 aa, synthetic construct
DEEEAKKEIERIVRAFYEAFNKGDLEAAASYLDDDWTLHVDRGRTITTKEEMREYLKQLLDNGIQLHIESIEVRVHPDKTHITVHVRVQVTNRSTGSTVTADDTHHFRRENGDFKMVETHITHREE

SEQ ID NO: 773 - protein, 126 aa, synthetic construct
DDKELEDKIREVLERLYRALNNGDMDTFMSFFDDDWTFHDSSGQTFTTKDEFRRWVERFLKAGWKIEVKSIEIHIHDNGEEVTVTVEVHIHNDQTGQQYTIHDHHFIRFENGSLKFVETRVQYRNE

SEQ ID NO: 774 - protein, 126 aa, synthetic construct
DEEEIRQRIEEIIRRLYEAINKGDLDKLRELIHPDATFHFSNGQTITNIDEFLDWVKKFTESGFKMQIHSIEIRIHPNKDEATGTVHFTLQNDRTGTHYRVTDHYFLRRKDGDWKVVRVQSNIHSE

SEQ ID NO: 775 - protein, 126 aa, synthetic construct
PEEEQKKAAEEAIRRLYEAFNKGDVDAMLSLFDDDWTFHDASGQTYTDREEFKRWVERLLSNNIHLQIRSIEARIDKDGSTVHVTVHAEMTNSTTGVTYTVTEHHTLRFENGSVYMVETHIHIHSE

SEQ ID NO: 776 - protein, 125 aa, synthetic construct
PLSEKELKEQVKELVKRYYDALNTGDLDTLLSLLDDDWRMHQKTQTWNSKEEFKDYVTKFKSNTNAEIQIRSMEIQIHGDTATVRVHVDVTIRNTGTTITYRDTHHITAGSNQAKITETKSDEDN

SEQ ID NO: 777 - protein, 126 aa, synthetic construct
PETSPEDREEIKRWVERYAEAFNKGDVEALASLFDDDWTFHDSSTGTTLTTKEEFKEWVKKLLSNDVKVEIKSIEIRTVPNGTIQVHVHVTYHSKDTTVTVHETHHFQKEGDTWKIKETQVHFHQE

SEQ ID NO: 778 - protein, 126 aa, synthetic construct
NPTSEEDKKQIKEIDQRRIEALNNGDRDALEELFHDDSTMHDESTGQDFTTKDEIKKWYSEVFDGDFKMQLDHLEIQSTDNGTVEVEGHATLHTKNSTVHVRYTVRYQKRGDTWYIIHVRYNFNQS

SEQ ID NO: 779 - protein, 126 aa, synthetic construct
SQTSPEDQKEIKDWIRRFFEAINKGDADAVASIFDDDWTYHNKSTGQTYTTRDEFKKWVEELFSNDAKIEIKRLEIQSNDDGTATVHVHYTMHVKDSTFTVTEQHHFEKEGDRWKIKETHTQIDQN

SEQ ID NO: 780 - protein, 126 aa, synthetic construct
SSEEETKEAVRQWKKRFVEAFNRGDADELRELFSPDVQMHFSNGRTFHNREEIVQFFTKQTQNGTKLTLKHMEIQIHSENRVTVTAHFEVHDDRDNKTYDMTTHDRYELRGDDWYLVETHIHIHQQ

SEQ ID NO: 781 - protein, 126 aa, synthetic construct
YSEEEIKEIVKDVVRRWAEAFNRGDWETLLDLYHDDATMHISNGQTFNDPDEIARYLTSLASQDRKMDITHIEIQIESENHATVHVHFEVHDSQDNKTYTFTSTFFIVFRGDGWKIVEQRIHTHQT

SEQ ID NO: 782 - protein, 130 aa, synthetic construct
PEDQEDIETWIRRFYTAFQHNDLDKLSELLTDDWTFHYVRDDERQTYDRDQFREWVERIAKTFKDIRVQLDSLRIEIRGDHATVEVHFTATFHQDGKTHTVHTTDTHHFRRTNGGWQIKETQFNLEQRSD

SEQ ID NO: 783 - protein, 126 aa, synthetic construct
DEEEAREQIKELVERWAEAFNKGDLDALAELLTDATVHYSYDKKTLTTKESIKEYYERVFRTFPGSQIELESIEIHFKDGTAEVHVHWTQTIPQTKEHYTGTTTFHVEFHGDDLKIREVRITVDSN

SEQ ID NO: 784 - protein, 124 aa, synthetic construct
DEEEAEKEIRELKHRFVEAFNKGDLDALLEMLHPDATYHDSSGRTFTTPEQFEEWMRRFLSFKVQIHIDSIEIHFSGDTATVHVHLTVHRDGTGQTYKYTATDHYVRFGDTWKIVRVQVHTQPT

SEQ ID NO: 785 - protein, 124 aa, synthetic construct
DEEEIKSQVEEFDRQRLESFDKGDWEAILRMFHPDATFHDHNGETLTSWEDFREWVKKFASNQTHHEIKEIRIEVRGNEVTVHVHVSVRYSKTNQQYKMTYTIRYRLEGDEWKIVEFRAHLQPT

SEQ ID NO: 786 - protein, 124 aa, synthetic construct
DEEEQRRQVKEWVHREIEALQKKDIDTWLSLFHDDFTLHISNGRTFTTKEQLEEFFRELASRDFRVEVKRIEIEVNGNEVTVTVHFTVHHDKENQTVDVTAHIRIRFEGKELKVTEKRMHFQPT

SEQ ID NO: 787 - protein, 124 aa, synthetic construct
DEEEMKRQARDWLRRWFEAFNKKDVDKILSLYDDDATFHDGNGRTFNSRESIEEWIRQFLSRDARIEVESIEFRVDGDHITVHVHFTVHFSHTGKTVRFTATFHFRREGDELKLLRQQIHSQDT

SEQ ID NO: 788 - protein, 123 aa, synthetic construct
ADPSAQEAVKQLVRRWVEAFNKGDLDALKELYDDDAQIHISNGQTFNDKEEYARWVEQLSQSAQLEIHGIEVRPTSKDYYTVHVNITMHVKDTGTTYHFTATFFVKRHDWKIVEQRTHFEQRG

SEQ ID NO: 789 - protein, 123 aa, synthetic construct
LDPSQEEQARQLARRFYDAFDKGDADKLKSLVDENWRLHVSEGRTFQSKEEVAEWVQKFADGTAHKMDEIRVQLDSDKDITVTVHVTVHNKKTGTTVTVTDTHHVKADDPKIAETHMHYNQHG

SEQ ID NO: 790 - protein, 123 aa, synthetic construct
LDPSQEEIIKELVERMVEAINKGDMEKLKELYHDDATFHAYNGQTFHDKEEFLDWVRKFASDAKLHITGIEVRPDSKDHITVTVHVEVRFDSTGTTVRFTSHFVIRNNDWKIQEEHLHRDNTG

SEQ ID NO: 791 - protein, 123 aa, synthetic construct
TDPSQQEAIKELIRRFIEAFNKNDMDTLKELFDDDWQFHHASGQTFNDREEFLEWVEKFARDYKLQLHSIEIESVSKDTVTARVHVTVHQDSTGRTAHVTETHFFKNNDYKITETRVHYDTRG

SEQ ID NO: 792 - protein, 128 aa, synthetic construct
ANDEDEEAVRQVLRRWFEAWNKGDWETLLSLYHDDARITHADTQTTYDKDQFREMYESQLSFDIKISVHSIQFDRASSHTITVTVHFQMHVNTPSRTHTVDVTTTFHLRREDGRWYIVEQRTRRDNKQ

SEQ ID NO: 793 - protein, 128 aa, synthetic construct
PGDETEEAIRQWFRREVEAWNKGDWETWLSLFHPDVRYHNADTGTTYNAEDLRRMFEQIQSVPFRLELKSIQIDQFTETEITVTVHMQWHFHHKHSTHTVDVTYTDHFRREDGDWYLIERHTQTDNGQ

SEQ ID NO: 794 - protein, 128 aa, synthetic construct
YDKSAQEAIKEWVEREAEAWNKGDWEAWASLFHPDVQYHNNDTQTTYNLEQLKEMFRQQQKIPHRVEVKHIEIKEMTDDEVKVEVHVQVHFHQKTREWTVDITATFVFRKDDGDYYLIEKHEQRDNKG

SEQ ID NO: 795 - protein, 128 aa, synthetic construct
ADDEAERQIREWLKRFYEALNRGDIDAVREMLDDDWRYEDAQRGQTYDKDQFIEMVRRMQSIPFQIDITHIEFKRSSDTDITVTVHVQLHVHHKDSTHTVDATDHHHFRNEDGRWKIVRTQTHRDNKG

SEQ ID NO: 796 - protein, 126 aa, synthetic construct
ADKEVQEAIKDWLKKWFEAFNRNDFDAIMSLYAPDATVENSGTNYEQFERWLREFLKNFQNSSLHVESVEIRLHPDKKHATVHVTVQVTEHHGDQTHHFTYHYTFHFQRTKDDWKLKRQQTQPDTG

SEQ ID NO: 797 - protein, 127 aa, synthetic construct
PSEEQKKAMEEWVRRYIEALNKRDADKLVSLYDDDATIHVNSSNKEYSKEEFKEWVERMMSIPFRVQLDRIEVELKPGGEITVRVHITITFTRNGQNYTFHGTQTLHFRYDESSWKLVRHEITYNQD

SEQ ID NO: 798 - protein, 127 aa, synthetic construct
PSPEDQEAIKQIKRRLVEAFNHKDIDKLSELVHDDSTFHFYTSGTTLDKEQFREWVERFMSFDFRIQIKSLEIRLDSGGEIRVTVHFDLTMHHNGQQHHVHVTAHDRYRRGDNGWKLVESRIRFDPD

SEQ ID NO: 799 - protein, 122 aa, synthetic construct
PSDEEIAKELVRRYVEAFNKGDIDKLASLYHPDARMHDSSKGTTYDREEIIEMLKELIKRGVKIEVKSIEVQTHNGEVRVTVHVTLTDDTTGQTFHVTRHIRFRKDNGDWKIVEDTFTTDTG

SEQ ID NO: 800 - protein, 122 aa, synthetic construct
PDDHEQVRETDERRIEALNKKDMEKIKDLIHPDATFTNSSEGQTYDREEYIERVKEMLKRGVKIELKEIHVEIRDGDATVHAHMQVTHDETGKTFNVTYTLRYRKSNDKWYLIEVRVTVDDG

SEQ ID NO: 801 - protein, 122 aa, synthetic construct
PSDEEAVRETDRRRMRAFDEGDMKKVSELLHPDVTFHFDSENRTYSRDEFLEWAKQFISQGYHHEIKSIEIHVKDGTVRVHVEIDQHDRRTGRTFKIDYQVTYVKNNDEWKLVELRYRRDEG

SEQ ID NO: 802 - protein, 122 aa, synthetic construct
PDDKEQIEEVDRRRLEAIDKGDIDAVASLYHPDATVHYSSQNRTYDKEEFLKMVEEMASQQTAHEIKQIDIQTKDGTVTVTVHVDVTFANTKTTVHVTYTIRYDKQNGEWKIVEVRITTDTG

SEQ ID NO: 803 - protein, 129 aa, synthetic construct
ASEEEAKEQIRQFKRALVEAINKGDWEALERLITPGATFHHQSGETYDAEEWLEMVRQTIEKFPHRVEIKELHIEIHPSGTEAHVTVHLQVHFTHNGKHETYTFTYHDRYRFKDGRIYLVSSQVHEDSN

SEQ ID NO: 804 - protein, 129 aa, synthetic construct
MSEKELEEAVRETLRRYYEALDRGDMDELRDLVDDGWTYHHASGETYSAEEFLEMVRQYTETFPTAHQIDSIEIHIDPSGTEVTVHVHVTVHTTHNGRTRTVRVTDTHHLRFKDGSVKIVETHTQEDST

SEQ ID NO: 805 - protein, 129 aa, synthetic construct
SSEKEIREAIRDIIRRLIEALDKGDWEALDELYADGATFHHWTGETYDKEEFIEMVRRFTERVETAHQLDSLEIHIHDNNRDVTVEVHVTVHENHNGQTHTRTYTSTFHLRVFNGEWRITSEHIQTDST

SEQ ID NO: 806 - protein, 129 aa, synthetic construct
MSEEEIKEAIKEILRRFFEAWDNKDMDTLRELFAPGATFHEYNGQTYDYEEWVERVEQTLRNVDTAHQIESVEIHIHPNNTTVHVTVHWTAHRHHNGQTHTVRGTTHFTLRRENGDLKIVEMRTQEDST

SEQ ID NO: 807 - protein, 129 aa, synthetic construct
MSDEEAKEQIKRFKEQWVEAWNKKDIDAIKELVTPGAQFHHQSGQQYDAEEYIEMVEEILKKFDATLEIKSMEIQKNDNNKEYHVTAHIQAHFTHNGSHETYDFTYHDVYRFENGQLKLVRTETHTDST

SEQ ID NO: 808 - protein, 129 aa, synthetic construct
TSDKEAEEAIRELVKRYAEAMNKGDIDTISSIYAPGAQYHNWSGQTYDYEEYLEWVKEFRSKFDFRLEIKSLEVHIHPNKRTVTVHVHITVHHTHNGEQHTTHFTSTMHFRNQDGEFKIVEEHEQTDSG

SEQ ID NO: 809 - protein, 127 aa, synthetic construct
PSKKDQEDIKEWIRQFYEALNKGDADAVAELYADDAKYTNNDTQRTFDKEEIREMVEELFKNNTHFEVKSIEIRMQDENTFEVTVHVTVHTNHGNQTHTNQYTQHFRFEKHNGRWYLTSDQTQSDGE

SEQ ID NO: 810 - protein, 127 aa, synthetic construct
PSKEDEEEVRELIRRFYEAINKGDMDKVRELLTPDIRFHNRSTQQDYDLEQFLKHIEELIKNDTKMEIKSLEIRQDDKDQITVTVNVTATTNHGDETKHRHVQHHWFLRRENGSWKIVEVQVQTDGS

SEQ ID NO: 811 - protein, 127 aa, synthetic construct
PSKEQQEKIKEWLDRFYEAFNKGDMDKIRELVTPDVKFTDEATQRTFDYEDWLKRIEELHRSDVHIEIKSIEFRVDSKDEVTVHVHLTVHQNRGDQTHTNHVTHTWFFRFENGSLKLVEVRVQFDGT

SEQ ID NO: 812 - protein, 127 aa, synthetic construct
PSKKDEEDIRDFIRRYFEAFNKGDLDALYRLYAPDATLHIESEQRTYDQEEIREWYERVLRQDTKIDIKSIEIRKVDDHEFTVTVHVQAHTNRGDQTHTAHVTFHFFFRKENGEWKLVEVRIRTHGS

SEQ ID NO: 813 - protein, 126 aa, synthetic construct
DDQEDKEAIEELIRRWFEAFNKKDWEKVASLYHDDARVHFASHGRTYDKEEFIEWVRTMLSFDVTLHVKSIEIHFSGDTVTVHVEGDATFHHNGQTYHVTVHSTFHFVKYGNQWYLTEQHIQFDQT

SEQ ID NO: 814 - protein, 126 aa, synthetic construct
DEPEQRKKIEEVVRRYFEALNNKDVDKVLSLLDDDWRYHNESTQRTYSKEEFREMVETLLSLDSEHRIQSIEIQLSGDEATVHVHVQVHTNKDGTTHTVNVTETHHLRQEGSQWKIVETRVTYNPT

SEQ ID NO: 815 - protein, 126 aa, synthetic construct
DTPEDQEAAEELIRRFYEAFNRGDVDTAASLMDDDWRYHNNSEGRTYDKEEFKEWVEQLLSQDTHLHLKSIEIQTSGDTYHVTSHWDATFNRNGQTFHVSTTDHHRLEREGDQWKIVETRVTYRQT

SEQ ID NO: 816 - protein, 118 aa, synthetic construct
PSDEEAVREVIRRFYDALNRGDWEELRRLVDKDNWTMHNNNQTFKTWEEFREWVERWFKNAQVEAHIRRIEFNGSTATVEVEVTYHHGDQTYHSRDTHFLQKRGDTWKMLETRIQYQE

SEQ ID NO: 817 - protein, 121 aa, synthetic construct
NDAEEQIREFIEREAELLNRGDIDAWADFLFDDDKSTFHYNGQQFTTKDEIKEFIKQMVSNSHFELHIDRIEIKDKTTVTVEVTIHITHDNRHRTVHTTFFFRVENGSVKLTRKETTTHQQ

SEQ ID NO: 818 - protein, 121 aa, synthetic construct
SDLQEAVKEFIKREAELLNRGDIDAWVEFVFHDDHSQFHVDGQTFNSKDEVKEWYERMVRNAEFEFHIDRIQVDDKDHVTVHVTVHVHTENSTFDVHVTIVLQFKDGDLKILSKHVHRQQQ

SEQ ID NO: 819 - protein, 120 aa, synthetic construct
ANQEQIKEWKERFVEAFNKGDADKLAELFHPGVQVHFAQGRTFHDKDEIREYLERLARHFEMHMEEIRIQIDGDTARVEAHVRITDKRTGTTYDVTYHDVYRIENGQLKVVRSEERTRST

SEQ ID NO: 820 - protein, 120 aa, synthetic construct
ADQEQIRQIVRNLIEAINKGDLDALMSYYHPGSEVHFSTGRTATDQEEIKDWFEKFARFVQLHLDSIEVHTHGDTATVHVHVTVHDRRTGNTYKFTSEIHFTRQDGTIRLTSEHVHMQPS

SEQ ID NO: 821 - protein, 120 aa, synthetic construct
LDKKQIKEWVEQYIRAMNEGDADTLASLYTPGATVHFSSGRTFTDQEELRQWYENWARDFHVQLDSVEIHIHGDTATVHVHMTVTNDKTGTTVRVTMTIHFQVENGQLKVKEVRITFQPT

SEQ ID NO: 822 - protein, 121 aa, synthetic construct
PDKEQVKEWVKQYIEALNNNDRDTLSELYDETKASMHVNGQQYDFDQIVEWYSRYLSQVTQFQLDSLEIRIKDGTVTAHAHVTVHVKHGNQTYRMTATFHFRYEGNTLKLIRVHYHHHQEN

SEQ ID NO: 823 - protein, 123 aa, synthetic construct
PEDKEIAEEWIRRMIEALNKKDADAVASLYDSDEATMHIDGQTFTTHEEIKRWIQEWLSKFDVQIHMESLEIQIHGDTVTVHVTLHFTDNKTGITFTVHRTLHFERRNGTMYLVEDRLHRQSD

SEQ ID NO: 824 - protein, 123 aa, synthetic construct
PEAEEQVKEAVERFFEAINKGDWEALERLFADNKATIHIDGQTFTTAEEFIRWFKEFRKKFDVTVQVDEIRIEIRGDTATVTVHWHMTDKSTGTTFRVTTHIRLENEHGTMYIVEMRIHTQDS

SEQ ID NO: 825 - protein, 123 aa, synthetic construct
PEQEEKVRQLKKRLIEALNNKDWKTFADLFAKDEATFHFDGETLTSKEELIRWFRDFLEKFDVKITPEEIHIELDGDTVRVTVHVQFTDDSTGTTFTADQHDFYVNKNGTLYIVRVEETTKDS

SEQ ID NO: 826 - protein, 123 aa, synthetic construct
PEFQEQVEEWKRRFIEAWNKRDLDTLADLFDKDKATLHWDGQTFTTKEEIKRFLEEFLKKFDTHIHMESFEIRLKGDTVEAHFHYQGTDNKTGVTFTFDTTDVYVNENGGMKILETRVHTKSD

SEQ ID NO: 827 - protein, 123 aa, synthetic construct
PEDKEKIKEWIRREIEALNKKDLDAWASLFDKDESTVHIDGQTFTTKEELKRWWEEFLKKFDVHFHLESIHIEIRGDTIHVTVHVQVTDNSTGTTVTFTAHIRFERQNGGWKLVEKRVHTHNS

SEQ ID NO: 828 - protein, 123 aa, synthetic construct
PEIKEQIKELKKKFVEAFNKNDVDALKELFDKDKAQFHFDGETIHTADEFREWVERFLRTFDVQMQMDGIEIHLDGDTATVHSTFQVTDNSTGTTFTVHATDHYVRENGTLKIVRTQFHTQSD

SEQ ID NO: 829 - protein, 120 aa, synthetic construct
PDIEEAAREIVKRLFEAFNRGDWETLVRLYSDNKSQFHYNGRTFDTWEEFVKWVKEFASQWQLHVDSQEIEVKDKDSATVHVHVTMHHKTKTVKFTSQFHMRREGNEWKVVREHVQTDGT

SEQ ID NO: 830 - protein, 124 aa, synthetic construct
PEEEMQKHIKEYVERYYTAINNNDLDTLESLIHPDWQLHNSNGRTWNDREEFKKTVEELFRRNIRIEVKSIEIHIHDDGSVTVHVQVTIHHEGHTTVQTRDTHHFQREGDKFKLVETHIQYIPT

SEQ ID NO: 831 - protein, 124 aa, synthetic construct
PEKEAKEEIKKMIERFFEAFNKGDLEKLHRMLHDDWQFHLWNGQTFNDRHEFAEWVRQMHEAGVKMEVKSIEIETNDDGTYTVHVHVKVHTPGNKTYDVTETHHIERHGDQFRFRETRVHMTPT

SEQ ID NO: 832 - protein, 127 aa, synthetic construct
DDEKEMEEAIRQWLRRYVEAFNNKDLDTIKELFDEDWTYHHTNGQTFTTLDEFEEWVERFLKRFDFEMHITQIDIQIFGKETVTVTMHVKVTFRETNRTFDITEHHHFERKGDEWKIKETREHRQPT

SEQ ID NO: 833 - protein, 127 aa, synthetic construct
PEEEEMKKQIREVLRQFYEAFNNKDLDALSSLVHDDATFHFSDGSTLHTKESFRDWVEKFLKRFDFRIEITSIEIRIHGTHEVTVHVTVHVTFNKEKRTYTVHETHFFRRDSTEWKITRTQFNWQPD

SEQ ID NO: 834 - protein, 125 aa, synthetic construct
PDPSAEEAAKQIVEELVRAYNEGDMDAFEEAYHPGATMHLPNGQTFTDLEEIKEWYERFKRTFPSRLEIKSIEIRQDSETTYTVHVHVQMHRSDGSTFNFTSTMVFVQKNGSWKIVEEHIHTQST

SEQ ID NO: 835 - protein, 123 aa, synthetic construct
LDPEDEEAIRQMIRRFAEALNTRDREKLKDLYDDHFTMDLGNMDAEQIKKWLEEFLERFKTFRIQIDSMEFEKDGDEVTVHVNVTVTHGSTGRTFEVTRTFFFRKTPDGWKLTNDHVHTRERK

SEQ ID NO: 836 - protein, 125 aa, synthetic construct
MSEEELREEVKEWLRRFYEAMNNNDLDKLRELLHPDWQHHDYSSGKTHHSREEFLEWVKQFLSQGWELEIKSIEIEVNGDEVTVHVTVQAKHPSGSTLTFHDTHRFEFRNGQMYLVETHTRVQQT

SEQ ID NO: 837 - protein, 118 aa, synthetic construct
PTGEEEIEKIARRLYEALDKNDIDTFVSLFHPGATIHFSKGETLTDPDEIRKWFAEWLKSVKSTAHEIKSIEIRGDTVTVHVETHLNHGDKTHTISVTDHYHFVDKFLTNVQSHENPT

SEQ ID NO: 838 - protein, 126 aa, synthetic construct
PSKDAQEAARQWVRRYFEAINKKDLDAFASFYHPDVRQHVNSEQRTFDREEIVERFKRYVETFSSFRIEIKHIEIEVRGNTVHVTVHVTVHHPQTGTTYDVTRHFTFELEGDSFKLVRDEVQTHQR

SEQ ID NO: 839 - protein, 125 aa, synthetic construct
PSPEQEKAARELVQRFYEAINKGDWETAVRLLTDDWQFHDSSGQTLHSLEEFREWFEKWHRAGFHIDITTIEVRLIDKDEIQVHVHAQVHSRSGRTTFNTHDTHHLRLFDTDWRIVRTEVRMQPT

SEQ ID NO: 840 - protein, 130 aa, synthetic construct
SDEEDERKIRDILRKYFEAFDKGDADKLKSLYDDDSTFHDANGQQFTDKDEFKEWYERWKSQFPTVHREIKSLEIRFDGDTVTVHVHVQVHVHHESSTVTIDVTATFHFERENGDWKIKEVRVHWDEKRQ

SEQ ID NO: 841 - protein, 130 aa, synthetic construct
TGEETEEAIREFKRKFLEAFDNKDLDKLKEIIDPDSTFHFDSGFTATSLEEVVEFLERLLRTYKDTAHKIDSMEIQQDGDEVTVTVHVTVHVNNDTSTITIHITAHDRYRKKDGDYKLVETHFHFDQRQE

SEQ ID NO: 842 - protein, 130 aa, synthetic construct
SGSEDEEKIREWKRRFIEAFNNGDLDKLAELVHDDATFHFSEGYTATNRDEVKEWFERVMRQFPTMRMEVDSQEIRVSGDEITVHTNVTVHVTNETSTTTIHVTTTDRYEKKDGDVKLTESRTHFDQRQS

SEQ ID NO: 843 - protein, 130 aa, synthetic construct
PGEETMKREVKKWVERFYELFNRKDVDALASLYAPGAQFHDSSTGTQYDREEFRRWLEEFFRRFPNVQIDVQRIEIQIHSGNEATVTVHAQVHFKDSNYTVTVTQHFHFRYKDGTWKLTEDRMHFDQDRS

SEQ ID NO: 844 - protein, 130 aa, synthetic construct
PGEETAKEEIKKILKRFYDLMDNGDMDAMASLYHPGARFHDDSKQQTYDLEQFREMVKRFLERFPDIQRHIESIEIQIDSGDEATATVHVTLTNKSNNQHVRVTQHFRFRYKDGTFKIVEDRIRTQNQNT

SEQ ID NO: 845 - protein, 130 aa, synthetic construct
PGEETIKEVIKEWLRREFEALNNKDIDKWKSLVDPGVTFHDDSKKQTYDVDQVAEMIKQWLETFKDVRIQVDEIRIQIDSGDEAHVTVHVTFHYRSSSTQVHVTYHLTFRYKDGTWKLLSKRAHTDNQNS

SEQ ID NO: 846 - protein, 128 aa, synthetic construct
PSEEEAKEQIEEWLRRFYEAFNQKDLEKLKSIVTPDATFHIYDGRTFTTLDEIAEYIKEMLSNESKIHIKSIEFHVNPDGSITVTVHVEVHTSNQNQTYRFTHHWHFKVDHDGQWKLVEVREHVDQHS

SEQ ID NO: 847 - protein, 123 aa, synthetic construct
PSAEEAAKEIARRLYEAINRGDWEAVRSFYSDDATMHVSEGYTYKSWEQIVRWIQEWFKRDWQIQVHSIHVEVKHPDRFTVEVHAQATNSSTGSTVTITQTFHFQRKDGTWKIIHDHMHIHQQ

SEQ ID NO: 848 - protein, 123 aa, synthetic construct
PSDEEIIREILERFYEALNKGDWETLSRLLDKDATVHISDGVTHTTLEQFREWVERFHSSGSKIHIHSIRIETKDKDSITVTVTVTVKNDQTGGTVTVTDHYHFRRENGSWKIVEVHSHFHQD

SEQ ID NO: 849 - protein, 123 aa, synthetic construct
PDIEEQIREIKRRLIEAFNKGDLETLKKLFDKDATMEISDGVTFTSIEEILKWFEEMNRNNYKLEIKSIHIQVDSKDTVTVTVHVTLQQDDTGRTVDVTFHDHYVFENGELKILRSEIRFHQR

SEQ ID NO: 850 - protein, 123 aa, synthetic construct
PDAQEAVKELVERFIEAFNKGDWETLKEIITDDWQNHDSSGITFTSAEEFREWVERILKDTRQITLKEIHIQVEHDDHVTVTVHIEQTNSKTGQTFTATEHHHIQRRNGSWKMTETHVQFHES

SEQ ID NO: 851 - protein, 119 aa, synthetic construct
PSEEEIRELVRRFLEAFDKGDADALASLYHPDATLHVYNGRTFTTRDEIKEWIERWFKAFSDVHREIKSMEIRGDTVTVHVTVHAHHKDKTVTYNFTSHFHFKDGKLISEEVHVDNTES

SEQ ID NO: 852 - protein, 124 aa, synthetic construct
PSIEEAVRDWIRRYFEAIDKKNLDELIEMFDEDWRYHLNGQRFSLEEFREMVERFLKSFPRVHHEIKEIEVHITKDHATVHVHVQVHLHQGDQTITIHVTETHHFRQENGSVKIQETHVDTKPS

SEQ ID NO: 853 - protein, 120 aa, synthetic construct
ASEEEAREWVKRYIEAFFNTKDAETAASFYTDDAQVHHSNGQTFDNKDEFKEWIKEWAKRAKRVHFQINSIEVNGDTVTVHITVTFHHDDRTTTTDFTSHFHFKDGKLTSERVQTHTHNE

SEQ ID NO: 854 - protein, 124 aa, synthetic construct
NPDEEEARELVKRWADALNRRDIDALKELIHPDATFHVDSETYDRDEYIEWFYKQFASHVTRVELKEIRVEKRGTTIHVEAHWTVHETHGDKDITVRVTTHFVFQKDHDGRWYLVELRIHFDHS

SEQ ID NO: 855 - protein, 124 aa, synthetic construct
DPDKEQVREVKKRFIEALNNKDLDKVASLVHPDAQFHYDSETFNYEEFREWYFKMIASHAERIEIHEIRIHVSGDTVTVHAHYTVHFTHGDQKRTVHITSTDHYRRDHNGQFYIVRMETHADHS

SEQ ID NO: 856 - protein, 122 aa, synthetic construct
DEKEARDAAREVVKRFAEALNHRDLEKLKSLYHEGATITFNGRTYRNPSREEIAQWFASLPIYRIQWQIDEIRVDGDEVTVHATVHVTHRNGNTVTFHSTFFLRRKDGEWKIVSEKVDRRQS

SEQ ID NO: 857 - protein, 122 aa, synthetic construct
DEKEQEEQVREWIRRFAEAVNNKDLDTLAELLDKDWTVHYNGETYHTPSKEEFKEWLSSIEIKRLEVHIREIEIRGDHVTVHVELHMTTSSGKTVRFEETHHFTVKNGELRLTRTHITTYND

SEQ ID NO: 858 - protein, 122 aa, synthetic construct
TSEEEAREIAKDIIRRLNEAINNNDMDALRELYAPDAQFTDASTGQTFDLEEFIKMIEEMLSSGTRIEFSIEEIRVSNNHVTVHITVHVHTGHTTQTVRRTIHFRVKDGEMKIKRDEINRNK

SEQ ID NO: 859 - protein, 122 aa, synthetic construct
SSEEEAREAVKRLKTRFVDAINKGDLDAIRELFHPDVTFEFASEGQEYDLEEFLEWVEKMLSNGTRIEFEIKEIQLSNNHVTVHVTLHFHTKDRTQTVHQTDHYRLVNGEWKIVRVHIDRQP

SEQ ID NO: 860 - protein, 122 aa, synthetic construct
MSEEEAKEAVKDWLRKYFEAINNNDLDALREMMAPDWRYHNADTKTTLDKEQFLKWVEDVFKNRTRFEFHVDEIRLSNNHVTVHVTVHLTTDDRDQTVHETHHLRYKDGTWKIVRTHVQTDQ

SEQ ID NO: 861 - protein, 122 aa, synthetic construct
YSEEEAQRDVRELVERFYEAINKGDMDTMESLLTPDWRYTDDSTGQTYSRDEFKEMIEKMLSQGTKIEIHIREIHVGKDHVTVHVEVHFHTGDRTQTVHDTHHFRLVNGKFYLVETQTNRNT

SEQ ID NO: 862 - protein, 122 aa, synthetic construct
SSEKETEEEVRRLINEFYDALNRGDIDALREILHDDVQFTNESYQRTFDKEEFLDWVRKMKSRNTRIEWEIKEIEISNNHATVTVEVHYHTNDQTYTFHDHYHFRLSNGEWKIVRVQSRSDQ

SEQ ID NO: 863 - protein, 118 aa, synthetic construct
DDEEMKEQAKEIIRRFYEAINKGDLDKVREILDEGWRFHDASKQQTFNKEQFLEMVEEMVKNNIKIEIHFKEIQIDDKDEVTVHVEVHIGNVTTTDTHRLRRTKDGWKIVETRFQVHN

SEQ ID NO: 864 - protein, 118 aa, synthetic construct
DKREDKEAIKEWVEREARAFNSGDMDAWYELFSPGAQFTNADTNQTYDIDQMKEILEKLWKAGFSLHFEIKEIEVKDDHEVTIHVEIHWRNQTVTYTDRFERDKDGWKITHRRIQTDN

SEQ ID NO: 865 - protein, 120 aa, synthetic construct
TTEDEARKAVRELLNRMYEAMNQKDMDKIYSMYAPDVTFHHHNGQTYDLDQFKEWVEKFLRHFELHWEIKEIQVHNGTVTVHVHVTAHTNGRTLHITQTFHFEFRGDEVRVKEDHIHEQS

SEQ ID NO: 866 - protein, 120 aa, synthetic construct
SSREEAEEIARQILNRFYDALNKGDMDKVKSLYHDDATFHHNKGETYDLEQFIKWVEEFIKHWELHWSIEEVRISNGEVTVHVHVQMHGDGETIDVTQTFFFRREGDEWKIVRDEIREQS

SEQ ID NO: 867 - protein, 120 aa, synthetic construct
PSEEEAREIVKEFIKREAELFNKGDMDTWYSLFHDDFRLHHASGQTYNLDQVLEMIERLARNFKMEFSIKRIEVHNGEVTVHVEVHFHTNNKTVTVEFTDRLEMHGDTVQVTHRHVREQE

SEQ ID NO: 868 - protein, 120 aa, synthetic construct
NSREDAEEAVRQLIEREVEAFNKGDMDTWEDLFHDDFRFHDSNGQTYDLEQLKKWVKELAENAELHFSITRIEISNNQVTVRVHMTFTTHNETRTITYHDHIRQEGDEWKIVRRQQQPDS

SEQ ID NO: 869 - protein, 123 aa, synthetic construct
PEEEELREKVKEAIERMARAWQHQDLDKIKSFYDDDSTVWYNNIDAEEFERWVEEALRRFKDARVEFHIDEIRVTDPTHVTVHVTFHVTTPSGQTHTSTRTFHFRFEDGQIKLVEDHVYNQQT

SEQ ID NO: 870 - protein, 123 aa, synthetic construct
DRREEIKEKVKEWLSRFYEALNRGDLEAIARMVDPDSTFHSDNKDWEQFVEWVERFLKRFPDVRFEWEIKHIQIETKDHVTVHVEVHVTHKDGSTQTSRETHTFEFKDGRLRLVRTKSDNQNT

SEQ ID NO: 871 - protein, 123 aa, synthetic construct
PKEEELKEKVKEAIERMVRAFNHGDLDKILSFYSDDATVDTNGESLEQFKEWVERFLKTFKDGRMTFEIKHIQIEHETQVTIHVEFHFTTPSGQTQTSRRTFVFRFEDGQIKLARDKFYNQQS

SEQ ID NO: 872 - protein, 122 aa, synthetic construct
PSEKELEEQVREWLRRFFEALNRKDVDEVASIFDEDWRVTHHTQTYNLEQFKEWVRQMLSQVESIEWQIDEIQFHGDTVTVHVTVHIHYTGKTVTVRETHFFTVENGSLKIKETRIQEDEVK

SEQ ID NO: 873 - protein, 122 aa, synthetic construct
MSEKELKEAVRRWVERYARALNNKDLDALASLYDEDATMHINNQEYSYEEIIRWYKEMLSQARRFQVHIDRIEVNGDTVTVHVTMTIHYQDKTVHVHVTFFFKFENGELKLKRVEFHEHEQS

SEQ ID NO: 874 - protein, 122 aa, synthetic construct
MSEKEMKEAVKEFINRYYDAFNKKDADAIASFYDDDATFHYNDTTYDKEEFKRWVTEFLKNVERVEWQIDEIEVNGNHVTVHVTATFHHPGKTVHVTQTFHFTFENGSMKLKEDRLHEQEQK

SEQ ID NO: 875 - protein, 122 aa, synthetic construct
MSEEEAKRAARELIRREFEIFNSGDLEAWASYFHPDARMHIHDQTYSWEEMKEWFKEMQEKVERIEVEIKEIEVRGDTVTVHVEVTIHHPNKTVHAEVTIFLRIENGQFKIISKHIRTQDQS

SEQ ID NO: 876 - protein, 117 aa, synthetic construct
PSAEEAARDLVRRWAEAFNNNDLDAVASLYHDDARVHHQNGQTFDKEEYKRWVEEMFRRAKQMEWEIKEIQVENGTTVTVHVTFHVRAYNITFHMTFHFRVENGQWYIIEQHISTEN

SEQ ID NO: 877 - protein, 117 aa, synthetic construct
PSDEEQIRDFKRRYAEAINKGDLDALRELLHPDVQFHHSSGETYDLEQWKEWVRQFRSQAKELEVHIERIEIRNGTDVTVHVTVHAKATGTTFHATDFYRKKDGSWKIVEVRLHTQE

SEQ ID NO: 878 - protein, 117 aa, synthetic construct
PSDEEAVREWKKRFAEAMNNNDLDALAELLHPDATLEHQNGQTSDREEIKEWAERLWRTATSIQVHIDEIQVDDGERITVHVTIHFKSRNVTVHATDHYEKHNGEYYLVRSQFHEQD

SEQ ID NO: 879 - protein, 120 aa, synthetic construct
TSEEVERKIREWFRRFVEAFNKGDMDTLAELYAPDARMRAYNLDKDDIKRWFEELFKNDVKVEFEIKEIQQDGDTATVHVTFHFTDSRTGKTTTFHSTFFFEFQDGELKLKHEQVHFSDQ

SEQ ID NO: 880 - protein, 124 aa, synthetic construct
PKDAEQKIREWLKRFYEAFNRGDADALLELLTSDSNVTFHEASGRTFTTLEEFREWVEEWLRQNWKTHIKSIEIRPDSKDEYTVHVHVEVRGTNQTIKVTETHHFRFENGSVKLVETRVRWDHG

SEQ ID NO: 881 - protein, 123 aa, synthetic construct
PVSEEEVREAVKRFFDALNRGDWEELLKLVDESQWRFHNADGSTLTTKEEFRKWVERLFRENWQFEIKSIEVRITGEEVTVHVHVQVTQRDTGKTFRVTETHHFRRGKDGWKIIRTQVHVDPQ

SEQ ID NO: 882 - protein, 126 aa, synthetic construct
PEEDEIRERVKEFIRRFYEAFNRGDVDALMSLIHPGATMHIDGQTMTSMEEIKEWFERFFKNGFKDAKLDIDEIRIQINSGDTVTVTVHVTITRQNGETYHVTNHDRFKYDKDGLKLVHHQAHTDN

SEQ ID NO: 883 - protein, 126 aa, synthetic construct
PEEDEVREAVKEFLRKFYTAINNNDLDAIASVLTPGATMTLNGRTFTTKEEIKEWFRQFFERGFKDVKLQIDSIHIQINSGDTVTATVHVTVTQPDGSHIKVTHHWHFKYDKDGFRIVNVQEQSHN

SEQ ID NO: 884 - protein, 127 aa, synthetic construct
PEEEEIKEAVKEIIKRFYEAIDNNDLDAIKRLYHDDATFHDSEPRTYHSKDEIKEWFKRWFESGWTDSRHEVHIREIRIDDKDQVTIHVTVHVTNADGSTTTVHQTFFIQRHNGEWKIIEDRVHTES

SEQ ID NO: 885 - protein, 126 aa, synthetic construct
PEEDEIRTQVIEVIRRFYEALNHNDLEKIKRLMHPDATMHIFDGTTMTNLEEIIKWLEEWMRTFPDFRIEVHITEIEIRGQGTVTVHVTVHITNKDGSTQTFHHTWFLTQHNGQWYIVEVREHRDE

SEQ ID NO: 886 - protein, 125 aa, synthetic construct
PQEEEMKEKVKDWVKKFAEAFNKGDADALASMYTDDSTMHISDSTTFNNREEIKRWFQKLMSQNIQMHVEIKHIQIHGRTHATVHVTFHLTHQNGQSVTIHSTFFFVFENGQLKLTNEQIHFQQN

SEQ ID NO: 887 - protein, 124 aa, synthetic construct
MSEQEFEEIARDYVRRFAEAFNKGDFDKLKSLLDDDWTFHHSSGRTFTTKEEFIEWVRQFLSNGFQIHFEIKEAQLHGTNHVTVHVTFHFTSKDGQTHTFHETHFFRFEGDSVKIVETQLHTDH

SEQ ID NO: 888 - protein, 124 aa, synthetic construct
ASEEEMKEAAKEIIRQIFRAFNEGDMDAIKSYYAPDATVHIWNGETLTTQEEIVKWFERLFSQNIEIEVHIRRIEINGTDTVTAHAEVHMHHPSGQTYTYHSTFHLELKDNRFFVKEEHLQRDH

SEQ ID NO: 889 - protein, 124 aa, synthetic construct
MSEEEMAEAAKEIIKQIVDALNNGDMDAIASYYAPDAQLHIWNGQTFHTLEEIKRWFEELFKQNWEIEVHIREIRINGSTHVTVHVELTFHHPSGQTYRFESTIHFEVVGDRMYIKSEHIQSDH

SEQ ID NO: 890 - protein, 124 aa, synthetic construct
PSEKEQEEAIREWLRRFYEAIDNGDWEAIRRLLSPDATMHVNGRTFTNLDEIVEYIRRWAENIQTAHEVHIREIQFHGNEVTVHVTVHATNRKTNSTITFHDTYHFRYRDNSWFITEVRSQETT

SEQ ID NO: 891 - protein, 124 aa, synthetic construct
PVGREAAEKFVRRLYEAFDKGDRDTFDSLFDDDWTFHDSNGETITTKEEMKKWFDTMFKQLGDTAHEVHIKHVEEKDNGRVTVHVEVHQHIKKTGTTRTVTDTHHFQYKPTGVYVVETRSQWHN

SEQ ID NO: 892 - protein, 127 aa, synthetic construct
SSEEEIKEAAKQIVRRLVEAFNHNDLDKLREIYHPDAQMHWNDQTFNSLDEIVEWIKQYLQRLRGSRIEFEIKEIRIHGTDEATITVQFHVHYSGENQTTTYHSHMRIRLEGNKWKILSEHVHEDST

SEQ ID NO: 893 - protein, 126 aa, synthetic construct
ASEEDQQEIKEFIKREAELWNRGDLDTWKELFHPDATLHDSSGITFTDQEEIHKWLEEFLKDNFKDTKIEIKSIEIQADDKDQVTVHVHITVHINGQTFNVTQTDRFRKDGDRLKIVNRHVTIDNS

SEQ ID NO: 894 - protein, 118 aa, synthetic construct
PDAEEDIKRLKEEFVRAFNTDLDTLKELFHPGVTFQSDNITFTDRDEIKKWFADLRSTMTVQVDRIEIQKNDDGTVTVTAHMTVHTPTQTFKVTAHDRYQLTDGRWRLVSSRFHRHDT

SEQ ID NO: 895 - protein, 118 aa, synthetic construct
PSDEEDMRQLVRRLIEAFNKDVDALFEIFHDGWRFHWNTQTFTDREEFREWVKELQSTTHIEIKEIRVEKKDNGEVTVEVHVTFHTPTQTFRVTETHHVRKEDGRWRFIETRVQTHSS

SEQ ID NO: 896 - protein, 126 aa, synthetic construct
PEEEEMKEKVKEWLERFYTALNRRDADAVASLYAPDSTFYVSRGETLTNPEEIKEWFKRFLDTFPDLKIHFTMEIHIHGRTTATVHVNMHVTHPSGQTYTFSQTFRFEFHNGRLKLTEDHLQTIQT

SEQ ID NO: 897 - protein, 126 aa, synthetic construct
PQEKEAQEKAEEIIRRFAEAFNKGDLDAFRELYHPDATMHVWEGRTFNSIDEIIEFFERVLRTFKDLEMHVTIEAHQSGDTHYTVHANFTVHQPDGKQVHYHSTFRLRLKDGEIKILEEHISRHQT

SEQ ID NO: 898 - protein, 125 aa, synthetic construct
PEEDEMKEAVKEILRRLFEALNRGDAEAIARLLDEDWTFHDAEPRTFTSRDEVKEWVKEMFKNDFKFHVESIEIQIYGRSTVTVHVHVTVTNKNGQTYHATETHHIRRKDGRFQIVETHNNWQPT

SEQ ID NO: 899 - protein, 125 aa, synthetic construct
PYEEEMKEKIKEWVKREIEALNKGDMDTWKRLLDDDVQYHDSQPRTFNSADEMKEFFKQLHDNNFRLELKSLEVQIHGHSEVTVHVTVTVHHSSGQTYHNRYTDRFRFNNGELKLVERQAYWDST

SEQ ID NO: 900 - protein, 129 aa, synthetic construct
DVSEEEAREAIKDWVRRYAEAFNRGDLDAFEELYHDDAQMHLSNGQTFNNKEEIKKWYEEFFRRFPGTQLEFQIDRIEVGHPGTYTVHVTFHFHHDSGKTTTVHATFHFEFRGDQMYLISVHYHTDNYP

SEQ ID NO: 901 - protein, 128 aa, synthetic construct
TSEEEMKEMAKEVIDRLFEAFNKGDWEKVKSLLHPDWTYHHSNGQTFTTRDEFAEWIIKFWSQGWRIEWEIKRIQIDDGKEVTVTVQVHYHHQSDKTTDAQEHHRLRVDDDKEVKVVETRVHTDEKPK

SEQ ID NO: 902 - protein, 128 aa, synthetic construct
MSEEEAKEIVKDLLRRMYEAINNGDMEELKRLFHPDWQYHQNKGRTFTTLDEFVEWAAQFWSNKWQLHWSIKEIRIHNGREIEVHVEVHITHESDRTITVRETHRFRVDDDHEVKIVETHTQIDEQPK

SEQ ID NO: 903 - protein, 124 aa, synthetic construct
PGSEEEIKDLKRRFAEAFNNKDAETLASLYDEDVEFTEDKETYKLSRDEFKERWEEQMKKQFPDLQVQIDSIRIENKNGDEVTVHVHLTMHVSDGQYHFTQTDVYRYQDNTWKIVRTQSHTRGG

SEQ ID NO: 904 - protein, 124 aa, synthetic construct
AGSKESIKEALKRYFEALDKKDADTLAELFDEDWTDTQDDETYHFSREEIREWFREFQSKHFPDSRHEIKEIRIQENDGERFTVTVHVDVHVKDGTYKVTEHHHVRVEGDKLKFKETRSHRQSS

SEQ ID NO: 905 - protein, 124 aa, synthetic construct
PGSKESIKEWKKRYIEAFNKNDADKLADLVDEDATFTHSNETYKLSKEEYKERVERIFKTHFPTAQIEVKSIEIENKDGDQYTVTVHVTIHVKDGTIRATQHDVYRFEGDQLKLVRTQEQHHGS

SEQ ID NO: 906 - protein, 123 aa, synthetic construct
DQHAEEAAREIIKRFYDAFNNGDMDTLKSLYHPDATFHDWNGQTFTSRDEIKEWLKQLFDNGWRIHFSIKEIQVHGTDEITVHVEVHFTNTNSGQTYTATQTFRFVLQDGKWYLVEDRLQRTG

SEQ ID NO: 907 - protein, 123 aa, synthetic construct
DKDAEEAARELVERFYRAINNGDLDTMLSLLHPDWTYHDSSGRTFTSREEFAEWVEKLFRNDIKIEVHIKEIRVHGTDEATVHVEVHFHNTNSGQTRTTRDTHHIRLQNGQWKIVRTEVRWTD

SEQ ID NO: 908 - protein, 123 aa, synthetic construct
DQSDEEAIREIIKRFYDAINNNDPDKLRSLYHDDATFHHANGSQLDDKEQIVQFFAELAKQGWQLEFSIKEIQFFGTDTVTVHVDVRMTQTNSGRTTTFHQTIVITKINGRFFIVRDQLQETR

SEQ ID NO: 909 - protein, 123 aa, synthetic construct
DKSMEEKAREWKRRFVEAFNKGDMDKLKSLLHPDATMHNADGRTFTNPDEIVKWFKELHDNGWQIEFSIKEIQIHGRTHATVHVEVHFTNTNSGKTITVRVTDRYVFKDGQIYLTESRFHFTD

SEQ ID NO: 910 - protein, 123 aa, synthetic construct
DQHDEEAVREVMDRLYEAINRRDLDKAASLFHDDWTLHHANGQTYTTIEEFKDWVKKMLDAGVEIRWKIDEIRVFGNTEVTVHVTVHMTHTNSGQTQTFHDTHHLRKINGQWYIIETRVQETG

SEQ ID NO: 911 - protein, 121 aa, synthetic construct
TSEEEIREWKKRYATAFNNNDWDKLRELVHPDAQFHFDEGTTFDNAEEYIEWLRKFFTTKHQIRFQIHIEEIRIHGDTVTVHMTVHGTHKSGQNYTWRVTVHDVYKDGKLTSTELHTDQHD

SEQ ID NO: 912 - protein, 121 aa, synthetic construct
MSEEEIKEILRRAFEALDKGDMDKIKSLYDKDAQFHFTDGITIDTLDEFIEWFVKFFLANSEAQYSHHVEEIRIDGDTVTVHFTVHVTHSSGQTITFRATSHFEFRNGKIQSEREQMHQED

SEQ ID NO: 913 - protein, 121 aa, synthetic construct
PSEEEIKEFIKRWAEALDNGDRDKLKSLYDDDATLHVSEGYQMDNKEEIVKWLAEWYLKLFTDVKRQIDSIEIRGDTVTFHVTVHMTRPDGKTVTVHQTSHMHFRGGKLVEQHIQTDEDEG

SEQ ID NO: 914 - protein, 121 aa, synthetic construct
PSEEEIKEWIRRYLEAIDNNDIDKLKELFTDDWEYHNYSGETVHNPDEFIKRWEEKFKKRVTRSKHDLDEVRIDGDTVTAHVTAHFTHKSGKDVTQHITEHHRFENGKLKETHETTHQDDG

SEQ ID NO: 915 - protein, 121 aa, synthetic construct
SSEEEIREWLKRFYEAIDNNDMEKMLRLVDDDVTFHVYQGITFENAQEFIEWWAQSFRRRFTDSRHKIDEIRIHGQTVTVHVTVTLHHRSGRTFHRTVTEHHTFRNGKLVETHVHEDQKDN

SEQ ID NO: 916 - protein, 120 aa, synthetic construct
ASEEQIKEFIKQYIELLNKKDIDAIASLYHPDAKLHDSDGSTYQNRDEIKEKWFKEFFESVDEMHIEIKSIHIDGDTATVHYQVHLTRGDRTHTYDVTDHFRFKDNKITEKESRMRDTTS

SEQ ID NO: 917 - protein, 123 aa, synthetic construct
PGAEEAVRQVIRRYVEAFNNRDMDTLRDLYAPDATYHNAKRQQTYSYEEFLQMVREFLEKFDFHLTFRIDEIRVTGDEVTVHVTFHLRRNDHKTEHQVHSTFHLRRKDGTWKIKEEHAHFDDK

SEQ ID NO: 918 - protein, 123 aa, synthetic construct
PDAEEAIRQLKRRFLEIYNTKDLDALRELYHDDVKFHNAKRNQTYDKEEYLQMVREFMEKFDFKIEVQIQEIEITGDEVRVTVEVHITREREGRTFTVQYHDRYRFENGTVKIISTQAHYDEQ

SEQ ID NO: 919 - protein, 123 aa, synthetic construct
PDAEEQIKDFKRRLAEAFQNKDWEALASIFDDNVTFRFASTNKDYDKEEYIQMVREFLEKFDVEVEVHFQEIEITGDHIRVRVEVHFTIKKEKKTYTATYTDRYRVENGDVKLVSTEIREDSQ

SEQ ID NO: 920 - protein, 123 aa, synthetic construct
PSDEEAIRQWIRREAEAFQRRDLETWASLFTDDSKVHDESTQTTFDKEELKDRVREFLEKFDFHVEVHIQEIRVTGDTITVTVEVHFTNNDEKKTHTVQYHDHFKKKDGQYYLKERHARWDSQ

SEQ ID NO: 921 - protein, 123 aa, synthetic construct
PGEKTAKEAARELVERVAEAVDKGDRDTLRELYHPDATMHIWNGRTFKNLDEIIEWFTQFGSDLQRHFRVDEIEVNGDTVTVHVTFTVHHSDGKTIRFESTFFIERKDGSWKIVEERIHADSG

SEQ ID NO: 922 - protein, 123 aa, synthetic construct
PGQETAERAVREWIRRFAEAINKNDMDALEELYHPDAQMHISDGRTFDSKDEIKEWFREMAENAQFHFSIDEIEVRGDTVTVHVTVQVHRRDGQTYTYHSTFFFRQEDGQFYLLEERIHNRSG

SEQ ID NO: 923 - protein, 123 aa, synthetic construct
PGRETFERQVREWIRRFAEAFNKRDMDTLFSLFHPDWTFHDSSGRTFTSREEFKKWAEEFASHFQLHWEIKEIRVHGDEVTVRVEVHFTHRNGQDFTFEETHRFRLINGQLYLIETHLRQDGG

SEQ ID NO: 924 - protein, 123 aa, synthetic construct
PGRKTMQEQVREWLDRFYTAMNNNDADALKSLYHDDATMHIANGRTFKSKDEIKEFLTRFASQFELHWSVEEIEVHGDTATVHVTVTAHHKSGQTYTIHQTFHFQFSDGRLYLTHDHIDNQSG

SEQ ID NO: 925 - protein, 125 aa, synthetic construct
PSEEEIREDIKELLKREAEAFNKRDLDAWLSLFAPDATMHDQSGQTFTTLEELKEWVKQLLSQNWEVEVHIDEIEVRGDHVTVHVTAHFTNQDTKQTITVHFTIHFQLRGNEWKIVEKHISTRQT

SEQ ID NO: 926 - protein, 125 aa, synthetic construct
VSEEEARERVKEWIRQWVEAFNKGDMDRLKELYHPDATMHLSNGQTFTTQDEIKEWYERLFRQNYRLEVHIKEIEIRGTTATVHVELHFTNESTGSTFTVHTTFHFQFEGDQVYLVEQRSHTDQT

SEQ ID NO: 927 - protein, 125 aa, synthetic construct
PSEKEQEEQIREAYRRLAEAFNKGDMDAIKSLYHDDAQMHIYNGRTFNNKDEIKKWWAELFKQNWQLQIEIKQIDFNGDTVTVHVQFHFTNESTGTTMTVDATHRWVFEGKEVYIIEVHYHTRQN

SEQ ID NO: 928 - protein, 119 aa, synthetic construct
PSDQEQIEELLRRFYERFAKQQDWKAFEEFFDPDAQYHNNNQTFHTLEEIVRFFKEMLERMQDVRFEVEEIEVRGDTATVHVTVHVTRNGKTITYRVTHHWVFKDGRVVEVREHTSEHD

SEQ ID NO: 929 - protein, 123 aa, synthetic construct
SGEEDEEDIRQIIRRYAEALNRGDMDALESLYAPDATVHDSSGRTFTTKDELKRWYDEWLKKFPQRVEVHIKRIEFHGDTVTVHAEFHVTTKDGTQTTTATFFFVKDHNGQWYIKEVHWNSNG

SEQ ID NO: 930 - protein, 123 aa, synthetic construct
AGEEDEKAVRDIVRRFYEALNKGDWEALASLYHPDAQMHLSNGQTFNSREEIVRWFREFLEKFPLQVHFEIKHIEFRGDHAHVTVEVHITTKDGTMTITQHITMTRDHDGSWKISEDHINFNG

SEQ ID NO: 931 - protein, 123 aa, synthetic construct
SGEEQEEKVREVIRQYYRALNEGDMETLKELIHPDATFHFSNGETLTNLEEVIEWFKRVFERFPFRIHFEIKEIRFDGDTVQVHVEAHVTHKDGTQTFHDTYFFKFDSNGRVKIVEVHSNANG

SEQ ID NO: 932 - protein, 126 aa, synthetic construct
ASEEEIRRAIEEMVRREAEAINKGDWEAWLSLFDDDATMHVSKGETFNSKDELRRWFEQLVKNNVKIEIHIIRIEIKDKDTATVTIEVHFTFTTYGRTITVNAHDHIVFEDGRFKITERHVTEQPN

SEQ ID NO: 933 - protein, 125 aa, synthetic construct
DVSPEQYEKIKQFLRRFYEAVDKGDMDTFVRLFADDWTLHVDGRTFTTKEEVKEFFERFHRNADVERHIEDLHVEQKDGYVTVHVRVTVHYKESHQTHHYQETHHVRFDHNGQLYFVETHVHTEN

SEQ ID NO: 934 - protein, 125 aa, synthetic construct
DASPEDEKEIREIIRRLYEALDRGDVDEFVSLFHPDAQFHSDGETIHTLEEYKEWVRRLHENADLRREIKRLEIEQKDGNATARVHVTVHYNESHQTHHYTHTWFFRRDHDGQWYIVEVRAQTHG

SEQ ID NO: 935 - protein, 118 aa, synthetic construct
PSEEQIKDILKKFYEAIDNGDWKTLRELVHPDAQYHHADGTTFNNVEEMAREFAEKWFKNNDTAHELEEIRIDGDTVTVHYTLHVNRGDTTYTFRGTDHFRFRGDKITEIRSHIQQTD

SEQ ID NO: 936 - protein, 118 aa, synthetic construct
ASEEEIRDLIRRFVEALNNKDRDKLKSLYHPDAEMHIYQGKTYTNLEEIITFFFEEFFSNNDAQIEIKEIRINGDTVTVHVTVHENHGDRTHTFDVTSHFHFRGKKLTEEHIHVQQTD

SEQ ID NO: 937 - protein, 120 aa, synthetic construct
ADEEFQEHVKEFKKQLIEALNKKDVDKFVSLFSDDATVHYNNGETLTTKDEIREWVERWIKSFKDFKIEVKSIEIRGNTVTVHMTVHMTHDSSTHTVDVTSHDRYENGRLKEMEQRHNQR

SEQ ID NO: 938 - protein, 116 aa, synthetic construct
TSEEEIREIKKRLLEALDNKDLDTFASLFHPGATVHFWDGYTAHDQEEIKEWFAQFFKKFDDDYRHEIKSMEVRGDTVTVHVEQHAHKRPQTFTITTHDRYENGKLKESRIHRNPQ

SEQ ID NO: 939 - protein, 116 aa, synthetic construct
MSEEQIRDWKRRFFEAFDKRDLDALAELWHPGATVHFSDGTTVTDKEEFKEWFARFFSRFPHDFRHEIKSMEIRGETVTVHVEMHWTSHPKTQTITVHDHYKDGKITESRFHVNDQ

SEQ ID NO: 940 - protein, 116 aa, synthetic construct
ASEEEIKEWVRRFVEAFDNGDLDTLVSLFDDDWTFHHSNGQTFTTKEEFKEWVKQFFEKFPQDLRHQIDSIEIRGDTVHVHVTQKHRDDKTTRKITETHHFKDGKLKETHQQHDDT

SEQ ID NO: 941 - protein, 119 aa, synthetic construct
TSEEEIRELARRYYEAFDNKDMDALKEILDDDATFTNNSTQTTVDAEEYIEWMERWLRRFPRVRHEIKEIRIDGDTVTIHVQVHFTTRSSQTYTVDVTHHWHFRNGKVVRLQVQTHQRE

SEQ ID NO: 942 - protein, 117 aa, synthetic construct
PISEEEIKEWLRQFFEAFNRGDLDTAVSLFHPDATVHVSDGITFTNLEELREYLKRLMDNNAQIEVKSIHISDGTVTVHWTMHMTHGDKTVTIRGTTHFHFRNGKLTEMHIHVDHNR

SEQ ID NO: 943 - protein, 116 aa, synthetic construct
PSEEEIRDIKRKFAEAFNKGDLDTLKELFHPDATVHFYIHNTTAHSLDAFKEWVRRFLRIPFTVHIESVEINGSTATWHMTVTFHHNGKQHHIRYTVHDHYTDGRIRETHFHVDTG

SEQ ID NO: 944 - protein, 116 aa, synthetic construct
PSEEEIRELKRRLVEAFNKNDVDKLAEIFHPDATIHFYQEPSTVHSKEAFREWVKKMARTPFRVEVKSVEFHGDTVTWHLQFTFTQDGKEVHIRVTVHDHYSDGQITETHFHFDEG

SEQ ID NO: 945 - protein, 117 aa, synthetic construct
SDQEEIRQWVRRFIEALNNKDMDTIASLYDDDATLHVYNGQTWTTREEIKDWFRQLIEKMKDVRFEIDSIEVRGDTATVHVTVHVHHETSTHTFHITSQFHFKDGKLTEEHIHENDT

SEQ ID NO: 946 - protein, 119 aa, synthetic construct
ASEEQIEELIRRFYRAMDEGDVEALAQLLHDDATIHFYNGITITSKEEFKEWVKRWQSQFQRIHRQIHSMEFHGDEVTVRVTLTVHRGNQTVHYRYQHHWRVQGNKIVEVEVRSDSQPT

SEQ ID NO: 947 - protein, 117 aa, synthetic construct
AGTEKIKDLLKKMYEAFDNGDWEAVASYFHDDSEVHFQGGITIHSREEFEEFIRQVLSNIKSLQREIREIRIDPSTQRVTVHVELHWNLGRRTVTVTETHVVRGDQITHTHVQEDQQ

SEQ ID NO: 948 - protein, 121 aa, synthetic construct
DSEFQQKVKDIKQKFIEALNNKDADKVASLFHPGAEIHVYQGITFTDVEEFRKWVEEFLRHWKDVKFQIERIEIDGNHVTVHVTVTFNHDHPGQLHFHFTFHDVYRNGRLVRTQINSQPKN

SEQ ID NO: 949 - protein, 120 aa, synthetic construct
DREEQEEEVRKWKKRFVEAFNNRNWEEIASLIHPGSTFYHTGGQPSDKEQFVRWVKEMAERIDHVEVHIDEIQFHGDTITVHVTSHFHQGDTTFTVHQTDHYQKRGDTFRLIETHTHRDS

SEQ ID NO: 950 - protein, 120 aa, synthetic construct
DKEEDKEAIKQWFRRYFEAMNNKDIEKIASLFSDGWTYYSPGGQPYDKEQFKEMVKKLLDQIKQIHWEIKEIRVDGNTITVHVESHIRINDKDITFHETHHFEKRDTQFYLIETHVQSKD

SEQ ID NO: 951 - protein, 120 aa, synthetic construct
PSLEEQIREWLKRYYEAFNRGNLDELAELVDDDWQYHDEKTQRTFHTREEFREFVERVMRTFPTMQIEIKRIEINGNTVTVHVTVHVTHPNSHTTVQVTEHHRFENGKIKETHTREHQQD

SEQ ID NO: 952 - protein, 120 aa, synthetic construct
PSWEEQIREWLKQFYEAIQNKDLDALARLIHDDARIHFESEQITLTTKEEIKEWFERFMKRFKNTHVEIKHIEIRGNTVTVHYHVTVHHDDRTVHFTVTDHFHFKDGKITEIRSRIEERR

SEQ ID NO: 953 - protein, 120 aa, synthetic construct
DEEEETEEQARQVDTRRFEALNRGDRDTVRSLFHPDATYVDSNGQSYDYEEFIEWVKRHRSDQQHLEFTIKEVRINSENHVTVHGEVTDQRTGVSATYTAHYRKNGDEMKIIRLEVNNNN

SEQ ID NO: 954 - protein, 120 aa, synthetic construct
DEEEKMKEIVRQIIRRELEAMNNNDLDAWLSLFHPDATYTQQNGQHYDREELKEMFERHRRYHSNIHIEIKEVHIDSEKHVTIHVQVTFNARGTTFTYTFFVRVGGDQAYIVRKHESNNN

SEQ ID NO: 955 - protein, 116 aa, synthetic construct
DKDFEEAAKEVIKRMYEAMNKKDLDKVASLYHPDAQFHYNNQTFDYEEFREWVERMLSTVSNIRFSIKEIRVHGDEVHVTVEVHFDSDKRTFEQHITIVRTGSQWYIVEDRMQTIN

SEQ ID NO: 956 - protein, 123 aa, synthetic construct
LNPEAEKAVRDTIRRYFEAFNKGNMDEIKSLFDEDWTVQDERTGTEYDLEEHLKRLKELLSNGTQMHVEIKEIRQSDSGEVTIHVTVHVTQDGRTFTVRETHHLRFEGETLKIVRTHLQFRST

SEQ ID NO: 957 - protein, 123 aa, synthetic construct
PDPNDQEQIKDWLRRYYDALNKGDMDAIKSLFAPDWRDTDASTGQTYDLEEHLERMRQMTSRNVKVEVEIKEIQIDKDGRATVHVTVRMTENGQTFTFHETHHFQKHGDGFQLVETHVHSHGS

SEQ ID NO: 958 - protein, 123 aa, synthetic construct
PNPEDIEAVIQLIKRMYDAFNAGDMDKLKSLFDDDWRWTDARTGQTFDLDEFLDMVRKMQSQDIKIEVHFKEVRQEKDGTIHVHVEVHVTRNGRTITYDDTHTFQKHGDSWKVVHTQTHERTN

SEQ ID NO: 959 - protein, 123 aa, synthetic construct
NDPNDEEAVRQILRRLIEAMNKGDWETLASMFDEDWRFHNSKTGRTFDLEEFVRMVRTRHSRGVRIEASVERIEFDHNGRVTVHVTVHMTENGRTRTYHETHHIQKHGDSWKIVETRQTERGN

SEQ ID NO: 960 - protein, 123 aa, synthetic construct
SDPEDLEQVKETDKRRVEAFNRGDMDTIKSLFHPDAQFTDDSTGQTYDLDEYIDRLRKLFSQGVQVEVHIHRVEQDKDGEVTITATVHWHRNGQTFTVRYTIRYRKTGDDWRIVEVRYQRHSS

SEQ ID NO: 961 - protein, 123 aa, synthetic construct
TDPSAEEAIRQIIKRLAEAFNKGDLDKIKSYYHDDAQFHFSSTGQTYDLEEFLDMVREMTSRGVQVEVHVDEIRQQDQGEVTVHVTVHFTENGQPFTVQRTLHFRLDGDSWKIVSDHITHHST

SEQ ID NO: 962 - protein, 123 aa, synthetic construct
PDPNDQEAVKQLIERFYEAINKGDLETLESLLTPDWRYTDASTGQTYDKDEFKDMVRKRFEQNIQIEIHFKRIEVEKDGTVQVHVEVHFTRNGQTFTTHDTHRFQKYGEGWYLVETRSHMRGG

SEQ ID NO: 963 - protein, 123 aa, synthetic construct
PNPEDQEAIKQIVRRYFEAFNNNDIDAIYSLYAPDSQIHFESTGQQFDVDELREMIEKRLRRGTQTEFEVKEIQVYKDGTVTVHVQVHMTTDGQTFTVDQTITITKDGDDWKIVEHRVREHGS

SEQ ID NO: 964 - protein, 122 aa, synthetic construct
TDPSVQEAVKELIRRFAEAFNNKDLEALKELYHDDARYRDSTGQDYNKEQIEEILERMMSRIQQMHFSIDEIQQHNDTEVTAHVTFHVTINGTTYTIHSTFFFVRTKDGWKIISEEVHERST

SEQ ID NO: 965 - protein, 122 aa, synthetic construct
TDPSFQEAIKEFYKEEAEAINKGDVDRWMSLFHPDATYYSSNGQSYDQEELRRMFERMLSTVQRLEFSIDEIQQDDSTHVTVHVTFHFTVNGKTYTVHATDRVQFEKDGVKILERREHTHST

SEQ ID NO: 966 - protein, 122 aa, synthetic construct
PDPEAQKAIKEAVRREAELLNKKDLDAWMSLFADDATFTDSTGQEYDKEEIREWVKQMLSRAQHFEFHINSIEQKDDTTYTVHVTVHVTIDGKTYTIHMTDFWVVTKDGWKIKRREVRTHST

SEQ ID NO: 967 - protein, 122 aa, synthetic construct
TDPSDEEAVRQVVQRLVEAFNNGDFDALKELFHPDATYVDSNGQEYNQEQIEEWIRRAMSRIQQIEFSIKEIQQDDHNRVTVHVDFHITVDGEDYTFHMTDFYVKTKDGWKLVRREVHERST

SEQ ID NO: 968 - protein, 124 aa, synthetic construct
TSEKEFEEMAREWLRRFYEAINKGDLDTLKSLFHPDWTYHNASTGQTYTVEQFLEMVKKMVENNVQIHWEIKRIEISGDEVTAHVEVHITTSSGRTFTVHDTHHFRVEGDRLKIVETRSQYQEN

SEQ ID NO: 969 - protein, 119 aa, synthetic construct
PSEEEIRQLLRKYMEAIDSQNGHDAVRELYADDATFTYNGRTFKTKEEIAQWYREWLSQHPDMRREIKHLEIRGDTVHVEFTVHFNHNGQTYTVDFRATFRFDHNGKIKEVRIHTHDKR

SEQ ID NO: 970 - protein, 119 aa, synthetic construct
PSEEEIRRLVKKLLEALDSGNGEDAIREIYTDDSTMHVNGQQFNSKEEIVEWFKRFLSQFPDIHRQVDSLEIRGDTVHVHVTMHVTHNGKKVTIHITSTFHFNKDGKLVEERIHIDNRD

SEQ ID NO: 971 - protein, 119 aa, synthetic construct
PSEEEIREMLKRFYEAVDSGNGEDAVQKLFHDDATFESNGQQFNSLEEIKEFIQKWASQFPDLHRQIDSIEFDGDTVTVHVTVHFNHNGQTHTVTFHHHWRFDKNGRIVSLHEQEHDNS

SEQ ID NO: 972 - protein, 121 aa, synthetic construct
SDEDQEEIKRVIEALARALDEGDADAFASFYSDDGRIHFADGSTLTTKEEIKEWVERFKSTNPDAQRHIHSIHFSDGEVTAHVTLHVTHGDKTVTIDVTRHFRFKDGRLKRDEIRWDEKPT

SEQ ID NO: 973 - protein, 119 aa, synthetic construct
PDQEEIIRTYIRAYVEALNSGNVEEMIDKLYHDDATVHVNTQTFTNKEEVKEWYKRWLSNFKDVKVEPQTNVEVRGNTVTLHFTVHATHGDETKTFHFTYHVRFRGKKITEEHVHENRG

SEQ ID NO: 974 - protein, 119 aa, synthetic construct
PKEEEIRRTKRKFFIEAFNRGDLERMVRELFHDDATFHYNRRTFKNPEEIVEWFRRFWESFPDATVEDNTHVHFDGDTVTFHFTVHLRHGDKDQTFHFTFHDRYKDNYLVEVRVQTDQG

SEQ ID NO: 975 - protein, 119 aa, synthetic construct
PKAEELIEIKIKYFAEALNRGRAEDMVRELFHDDAQIHVNNQTFTNREEIIEWFKQWLRRFPDTHVDNDAEFHVDGDTMEAHFTVHVNIGDQTYTFRITVHDEYRDNYLYRTQMHFDTG

SEQ ID NO: 976 - protein, 119 aa, synthetic construct
PKQEEIIRTFLDFFVRAFNTGNVDKMVDDLYDKDAQLHVNNQTFTTLEEIKKWFREFLKTFKDVQVHNESNVEVRGNTVTVHFTFHATHGDTTYTFTMTSHVTFRGDRIVEEHVHFDSG

SEQ ID NO: 977 - protein, 119 aa, synthetic construct
PDQEEIIRILLRKLAEAYNTGNIERMLRELYDKDAQYHYNNQTFHTLEEIIKWFKEYFKRFPDVHVELESNVRVEGDTVEAHFTVHVRQGDKTITYRYTRHFRFEGKKITEDRSHEDKG

SEQ ID NO: 978 - protein, 119 aa, synthetic construct
PDQEEIVKILLRKFVEALNSGNWEEYVDELYDKDVEVHFNNQTYTDKDEIKKWFTEWFSNFPDVKVEIHSNVEVRGNTVTIHFTIHVTLGDKTYTYRVTRHIEFRGKKIYRDQAHFDSG

SEQ ID NO: 979 - protein, 119 aa, synthetic construct
PDQEEIVRTYLKLFVEAFNSGNWEEFFERLYHDDAQMHVNNRTFNDKEEIKKWFREWFERFPDTRLENKSNVEVRGNTVTFHFTFHVTHGDQDYTYHYTFHVTFRGKKITREQVHEYRG

SEQ ID NO: 980 - protein, 119 aa, synthetic construct
PKQEEIVEEFLKKFAEAFNKGEIERFIREIYHDDAQFHYNRRTFNNPEEMLEWFRQWFERFPDVHVTLNSNVEVRGDTVTIHFEIHVNHGDRTYTFRYTSHITFKGDKITEEHMHTDSG

SEQ ID NO: 981 - protein, 117 aa, synthetic construct
PDPKQIKKEMAELLNSGDWKKALEAFERYFTPDAEITFNGETITTLDELKEWIKKWFEDVKDAQVHVDENIEINGDHVTAHVHIHFSGENQTVTATQHDVYKDGKIKRSQDHSQPNN

SEQ ID NO: 982 - protein, 129 aa, synthetic construct
PSEEELKERVKEWIHREVEALNKGDWEAWKRMFHPGAQFHDNTRQQTFDLDEVTDMIRKQQRHSDVHVEIKEIRIEIKSKDTVTVTVHVQVHEHHGDQTYTYSVTTHFHFEFRGDELYITEKQTQRDRT

SEQ ID NO: 983 - protein, 129 aa, synthetic construct
PSEEEQERAARDWLRRWFEAMDKGDLDTLSELYAPGAQYTDATTQQTYDKEEFLEMVRQLFENSGVQHHVDSVEIEIKDETTVTVTVHVTVHWHHGDETRTVTITYHFHFRFEGDELKLTHQQTRRHQN

SEQ ID NO: 984 - protein, 129 aa, synthetic construct
MSEKELEEIARDWVRRFFEAFDKGDMDKLRELYTDDAQYTDARTQRTYDKEQFLKMVEKYLRHTGTAHHLESIEVRIDDETHVTVHVHVTVHHHHGDETKTVHVTSTFHFRFEGDTIKLVEEHVQFNQS

SEQ ID NO: 985 - protein, 127 aa, synthetic construct
MSEKEREEAIREWLRQFYEALNKKDLDAIRELFTPGAQFTFNGQTFNDAEEFEEWVKKWLSADFQIQIESIEIRINDDGSATVEVHVTVTNRKTGETIRFTDTYFFRFEGRQMKLVRVESRSDQLKD

SEQ ID NO: 986 - protein, 127 aa, synthetic construct
ASEQEIKEAVRELIRQFYEALNKKDRDKVRELVAPGATMHVDGQQFDDLEEIEEWATELMRQDWELRVKSIEIRINDDGSVTATVHFTAHNRKTGTTVDVTDHYFFERRGDEFKLVRVESHRNQKKD

SEQ ID NO: 987 - protein, 127 aa, synthetic construct
MSEEELKEAVRQFAQRMYEAFNKRDRDKLDELLTPGWRFESDGQQFDDKEEFKEWVDRMLSNKFHLHVKDMEVRVHSDGTVTVHVTVELRQDDTKRTWTTHDTHHFRFEGDQVKLVETRVSFQPNKD

SEQ ID NO: 988 - protein, 126 aa, synthetic construct
ASEKEAEEAIREILRQYFEAVDKGDVDAVASYYHDDARYTQAGRNETYNKEQIKEWYERFLSHFDTQRHMKEIRIQFDSKDHITVTVHVEAHHNGSGQTVTFTYHFHMQRDEGEFKITRVQSHNTD

SEQ ID NO: 989 - protein, 126 aa, synthetic construct
SSEEEAEEAVRRVVRRFFEAVDKGDMDTLRELLHDDWTYHQNDHNETYDKEEFLQMVEQWARRVRVHRQFHGLEIRQSDKDEYTVHVHVTVHHDGTNRTQNVTETHFFRRDRDEWKIIETRVTTTD

SEQ ID NO: 990 - protein, 126 aa, synthetic construct
MSEKEIREAIKEWVRQWAEAFNNKDIDTIASLYHPDATVTHKGTNQTYDYEEYVRMVEEFLRKFDTRFEIKSIHIELSSEETVTVTVHVTATNTGEGQTFHFTYHFFFRRFDGQWYLLHQREDNTN

SEQ ID NO: 991 - protein, 126 aa, synthetic construct
TSEEEVEEAVREFLKRWVEAFDKGDMDTLRELYHPDATVHFNDHGETYTYEEYLEWVARFLSNFNLERHIHEIHIENESSTSATVTIHMTVHRDGSGQTFHFTYHFRLRQDSGEWKIVEQHVTTTN

SEQ ID NO: 992 - protein, 126 aa, synthetic construct
TSDKEIEEAVREWVKREIEILNNKDLDAWASLFAPDATYTQAGTNQDYDYDQMREMVRQYLEKFNAKIELKSLEVRSDSKDSATVTVHIDITEDKSNRTITFTYHFHFRQDDGEWKLKRKQTHNTN

SEQ ID NO: 993 - protein, 126 aa, synthetic construct
TDKSVEEDIREILKRFYEIFDSGDADKVASLYDEDATFHDSKTGTTYDREEFKERVERQASNDSRHQIDDVRVEQNGDDVRVTVHVTVTFNKDNQQYHSEFTQHFRLRLENGQWKIKEDRLTTKDR

SEQ ID NO: 994 - protein, 126 aa, synthetic construct
TDPNDEKAIRELKKRAIEAMNTGDWKALKEIFHDDATFHDARTGKTYNLEEYIRMFKELQKFDMRIEVKSQEIEQRGDQIHVTTHMEVHVNHGDQTKTTRVTTHDVYVKENGDWKIAETHYHTDDS

SEQ ID NO: 995 - protein, 126 aa, synthetic construct
ASEEDQRAIKEVKKQLAEAFDRGDWERLRELLHDDVTFHNSKTGKTYNREEFREMVERFASIPAQRQIDELHIEQRGDDYHVTAHVTVHEHKDNQTKTYRVTFHDVYRKKDGTWKVVRSQEDIDDE

SEQ ID NO: 996 - protein, 126 aa, synthetic construct
ADPSDQEAIKKILERFYRAMDEGDREALDRLLHDDVQFHDSNTGKTYSKEEFLEMVTEQAKFPLQRQIHGMEITQDGTTYTVHVTVTVHVNHNNQPRTNTFHDTYFFQKKDGQWKIVEVRSTSDHS

SEQ ID NO: 997 - protein, 130 aa, synthetic construct
MSEKEAQEAAKEVIRQWLEAFNKGDMEALKELYDDGAQVHFASTQQTYDKEEFLEWVKKMFKQDTKMELKSIRIEIDDHNSVTVHATFQLHTNQGNTTITFNIHSTFHLTLENGKWKITEQHITMHQEQT

SEQ ID NO: 998 - protein, 130 aa, synthetic construct
MSEEEMKEAVKEFKRQFVEAFNKGDFDRMRELIHPGAQFHFASTGQTYDVDEFLDWFRKFFENNTRVQIDQIDIEVKTPTDVTATVHITFHVTHGNTHTTFHVTFHDHYRFKDGQIYLIETHIRTHQRDN

SEQ ID NO: 999 - protein, 130 aa, synthetic construct
ASEEELKEKVKEIVKRFIEAMNKGDMDAVKSLYHPGARVTFSNTNQTYDLEEFLEWVERLTKQGTKIDLESIHIEIKDETTVTVTVHVTFHTTHNTKHQTFHVTSHMHFQLRDGQLYIIEEHVTTETRDS

SEQ ID NO: 1000 - protein, 123 aa, synthetic construct
DKREEFKEQIKQLVQRLVESFNTGDRDAFREIYHPGAKFHFSNGRTYDKEEFEEMVEEMHRRDIKLELESLEIHVSGDEATVRVSVTAHNSSDNKTTRFDSTFRFRVGDGEMKLTEEHIHRND

SEQ ID NO: 1001 - protein, 130 aa, synthetic construct
PEEEEIKEKIKQFKRQLVEAFNKKDLEAIAELIHDGAQFHFYQTQRTYDKEEYKEWVERMLRNNTQIHIESIHIEIKDNGEVHVTVHFTAHRTQNGKNYTIHGTAHDRYRVKDGKLRLIESRIQLHEQPQ

SEQ ID NO: 1002 - protein, 130 aa, synthetic construct
PEEEEMIRQVREFLRRLMEALDKGDADTIRSLMTDDWTFHDSSQQRTFSKDEFVEMVKKFASNDVKREVHSIRFEIKKDGELTVEVHVTVHATHNGKDYTQHITETHHFRFKDGELRLVRTQVTTHQQPN

SEQ ID NO: 1003 - protein, 130 aa, synthetic construct
PEEEKMEQAIRELVRRLIEAFNKKDIDKIDSLYHPGAQFHFYSTQRTYDKEEFREWVERLLSFDTQFQVDEIRVQLYDDGTATVQVHVTVHTTHNGKRYQTHMTSHFFMRFKDGQLYILSERIQMHTQPT

SEQ ID NO: 1004 - protein, 127 aa, synthetic construct
PSISEEQVREWVKKFFEALNNNDPDKLEELFHPGSTVTFPDTGTTLDQEEFKEWVERMLRSAKDSHFQIESLEVRIHGDTATVHVTWTVHFNHGDRTETYTGHTTFHFKRHGDEVRLVNMQVQTDQT

SEQ ID NO: 1005 - protein, 129 aa, synthetic construct
DEETEIIEDAEEILRRYYDAFNKGDLDTMYELVHPDAQFHDSTGQTYDLDEWFEWLREILEKTDMKIEIKSIEFRIDEDSRTIHVTVHVTVHLTHNGETKTYTVTHHWVLQRRGDSVYVVSVEERRNSH

SEQ ID NO: 1006 - protein, 129 aa, synthetic construct
PDTEEAKEDIRQIIRRFFEALDKGDMDTLRELVDEDWTWHDNDGQSYSAEEFLEMVERFNRNFNSNHHLESLEIRQKPDQREFTVHVHVKVRFTHNGKNVDVDITETHHLRKKDDEFKIVETHTHPRQT

SEQ ID NO: 1007 - protein, 129 aa, synthetic construct
NDEEEAKEAAKQIIERLVEAWNKKDLETLDSLFAPDWKWTNANGQTYDREEWKEWVERWMRHFDTKIEIKSIEFRVQPDSRQITVHVTVQVTHTHNGQQRDVTFDETHHFRKFGDSWKVVETRTQPRQT

SEQ ID NO: 1008 - protein, 129 aa, synthetic construct
PKEEEAKEIVKELLQRFYEAMDKGDMDKLRSLFHPDATFYDSTGQSYDLEEWLEMVRQSTENSDSRHHIKSIEIRQDSDERTFHVTVHVEVHFTHNGETQTYTFEHHWVFVKEGDSVKVIELREHRYNH

SEQ ID NO: 1009 - protein, 129 aa, synthetic construct
PDEEEAREAVKQTIRRLIEAWNKKDWEALRSLFDEDWKWHNADGSTYDLDEFIDWFRKWQRHFDTHVELKEIHIQIQPDKRHITVTVHLTMHEHHNGQRQTYTYTEHHHLRRQGDDFRIVETHTRPINH

SEQ ID NO: 1010 - protein, 129 aa, synthetic construct
PDEEEDREDIKEWLKRFYEAIDRGDADALREMIHPDATFHHASGQTYNLEQFLEMVERTRRHSNSNHHLESIEIRLDDDKRQITVTVHVTVHFHQDGRQYTFRFTEHHRFRKEGDSWKLVETHINSNQT

SEQ ID NO: 1011 - protein, 127 aa, synthetic construct
ASEEEARKAIEEIIRRLIEAFNKGDLETFMSLFDEDWRYHNDSTKRTFDYEEVKEMVKRLLEAGFKLQVDSIEIRQDGNDEFTVTVHVTVTQTHPGTKTVHITEHHRFRYGESSWKIVETRVRRSET

SEQ ID NO: 1012 - protein, 127 aa, synthetic construct
PSEEEIKEQIRQFDRRRLESFNSGDIDKAVRLVHPDATFRFDSTQKDYDLEEFKKMMEELFRSNTHLQLHGLEVQVHGRTHATATGHITVHFRHPGTRTTHFTYTVTYRYGDNDWKLTHMRVHREHR

SEQ ID NO: 1013 - protein, 127 aa, synthetic construct
ASEEEIEEAVRQIVRRWVEAFNRGDADEMASLYTPDAEFTHQSHQQTFDKEEFREWVTRMFRAGVEVELKSVEIQIFGDDTVTVHVHVQLHFRHPGTKTVHVTFTFHLRYGESSFKIVRQEIRRHND

SEQ ID NO: 1014 - protein, 127 aa, synthetic construct
PSTEEAVRELLRQFYESFNNKDWKKIEELFAPDARMHNQSTGRTWDYEEIVEWFKRFASNGHDVQIQIDSIEIQQGPEGHATVHVNVTFHFHHNDRTRTVQVHETHHFRLTKDGWKITRTQIHRVQK

SEQ ID NO: 1015 - protein, 127 aa, synthetic construct
PSDEEAARELVRKFFEAWNNRDREKLEKLVHPDATFHFPSHQQTYDWEEFIEWLERSAGNNVDAHIEIKDLHVQSTDEGEFTVEVHWTVTFHHGDETKHVDATTQFHFRLTKDGWKIVEVHFTHDNQ

SEQ ID NO: 1016 - protein, 127 aa, synthetic construct
PSTEEAIREWIKREIEAFNKQDLDTWISLFHPDATMHVSDTNETFDYEEIKEWFSRFAGNNVDVKIQVDSIEVRETDEGHVQVHVHVTIHFHNGDETRTLRFTFTDHFRLTKDGWKIVERHITTDGS

SEQ ID NO: 1017 - protein, 128 aa, synthetic construct
NSEEESKEIAKELKERFIKAFNEGDADAAVSIVFTPDSQFHDKDGRTYNLEQFIEYLRELLKNDVKIHLHSMEIRVHGNGHVRVTVHVTLTSTHNGSKVHVTVTAHDFYQQKDGTMKIKRSQFHEDSN

SEQ ID NO: 1018 - protein, 124 aa, synthetic construct
SSEEEFKEAVKETIQRMIEAFNTGDMDKIRELYHPDFRFHHSSGQTFDKEEFLDMIRKLLSQNVKIELKGIEFKEITDTEVHVEAHVTVTNNSTGTTYHFTSHFRIRQDGDEFKITEEHLRTIG

SEQ ID NO: 1019 - protein, 124 aa, synthetic construct
TSEEEFRKAVEELLKQFYEALNKGDLDKLRELLHPDARFTHDQGTTYDREEFLEMVEELVKAGVRIRITGIEFKEITSEEVTVQVHVDVTNSSTGTTVHVTEHHHIRQEGDEFKIVSTEFRRDS

SEQ ID NO: 1020 - protein, 124 aa, synthetic construct
YSEEEVKEAVKEWKKRYVDALNKGDMKEISELIHPDARFTHERGETYDRDEWLKMIEELLSQNYHMQIRSIEFKEITEREVTVTVHVEVTNASTGTTYKFTYHDRYRFEGDELKLVELREHTRD

SEQ ID NO: 1021 - protein, 124 aa, synthetic construct
MSEEEFKEAVKEWIRRYVEAWNTKDLDKLHELYDDDATFHHQDGETYNRDEWLDRVRELLKQDYQIQLLSIEFKEITDTEVHVQVHFQVHNRKTGTTRHMQRHFRFRFEGDELKLQEDHERRDS

SEQ ID NO: 1022 - protein, 124 aa, synthetic construct
PSEEEAKEAARQIIERLYDAFNKGDLDKLRELMHDDWRYYDSTGQTYSAEEFLDMVKKAKEADVHVQIDSIQVQEVSSHTITVEVHATVHNGSTGTTVHTTDQHHFQLFGDEWKIVETRVHTDG

SEQ ID NO: 1023 - protein, 124 aa, synthetic construct
MSEEELKEAIEEWKRQFIEAINKGDLDKLRELVHPDARFHHASGNTYDREEFLDRVEKLNKNNFQFDMKSVEFKELTSHEVRVQVHVEVHNRNTGTTFHFTQEDRYRIEGDEVKLIETRETSHG

SEQ ID NO: 1024 - protein, 124 aa, synthetic construct
PSEQEFEEAIREFKKQWAEAFNNKDMDKLSELIHPDARFDHASGQTYDKEEYLKMIEEMLSNDWNIEVEHLEIKEITERHVTVEVHMTFTNNRTGTQYKVTQTDFYRIKDHEIKLVKSQEHHDG

SEQ ID NO: 1025 - protein, 120 aa, synthetic construct
TSEEQMEELARRYYTAFNNKDWKAFADLLDPDATVTIFHDGQQHDYDWEQMVEMVKRIAETFKRFRIQIDSIEFRGDTVTVHVTFHWTNDSEDTTVHATHHWVFKDGRLTELHAHYNRQR

SEQ ID NO: 1026 - protein, 119 aa, synthetic construct
ADEEELRELVKRYAEAMDRGDWEAAARLMHDDWTFHLNNGQTFTTQEEFIRFVQQFFSNADSRHDIKEIRVHGDTVTVHVTVHVNHKTGKTYTIHATEHHEVRNGKIARTQVHEDTQPT

SEQ ID NO: 1027 - protein, 119 aa, synthetic construct
DSEEQIKELIKEFYRAINERDLDALSELLHDDAQLHLSNGQTFDNKEQIIEWFKRMLDNSDMRVQIDEIRIDGNTATVHVTMHFTHDSGKTVTVHVTEHHRFKDGKIVRTQIHFDSQPN

SEQ ID NO: 1028 - protein, 119 aa, synthetic construct
PDEEKLRQWKKKFIEAFERGDLEKLEKMIHPGARFHFAEQQITFTDREEFRQWVEEFLERFKNTHIEIKSLEVRGDTVTAHVTVHTTHGDKTQTYDYTTHDRYEGDKLVESRFTFDTKN

SEQ ID NO: 1029 - protein, 119 aa, synthetic construct
PQEEKLEEWKRRFIELVNRGDLDALKEMIHPGATLHDENTQVTYHTLEEIKKHIEDWLSRFSDSRFQIDSIEIRGDTVTVHVTFHFRHGDKTTTIHMTQHDRYKDDKLTESHTHYDTKD

SEQ ID NO: 1030 - protein, 119 aa, synthetic construct
PDEEKIKEWVKRFFEAFERGDLDALVELLHPGVQITFSQYQQTMHDLEEFKQWVEEQLKTLEDTKFQIDSMEVRGETVHIHWTVHTTHGDETRTVHVTTTFHFRGDRITEIRFHFDERR

SEQ ID NO: 1031 - protein, 123 aa, synthetic construct
MSEEEIKDWVRQFMETLDEAFEKGDWKAVKEMFDPGVTIHDDSRKETFTDLEEFARKFFTKYFKNIKDMRREVKEIEIRGDTVHVHWTVHVTHNGKKITIHGTTTFHFKDGKLVEVHFHFHPT

SEQ ID NO: 1032 - protein, 123 aa, synthetic construct
DSEEEIKEAVRRFYAAMNEAFSKGDADKFKSLFHPGATFHDDSTGTTFTDLDELAERWFREFFETFKDMEIQIDEIRVDGQTVTVHVTVHVTHNGQKITYHVTDHYTFKDGKLVSMRSQWHQT

SEQ ID NO: 1033 - protein, 120 aa, synthetic construct
PSEEEIKEWLEKFYEALAKGDLDKMRELLHPDATMHIAQSQVTFTDLEEIMEYLKQWIEKAKDTQMDSMEIHFDGDTVTVHVTITVHTPEKTYTFHVTHHWRFKDGKVTEVRETTETRET

SEQ ID NO: 1034 - protein, 120 aa, synthetic construct
PSEEEIKKFKKRLIEAFANGDLDALEELFTPDVTIHFSSEQVTFTTKDEFKEWVRQFLSQFKDIQLDNMTIHIDGDTVTVHVTITVHTDTQTYTFHWTTHDRYKDGKIVETQFHVETRET

SEQ ID NO: 1035 - protein, 120 aa, synthetic construct
PDVSEEEIREFLRRFYEALDRGDVDAVVEILDDDWQFHDSSGVTLHTKEEVKEWVERWVKSLPDVRREIHDLHVDGTTVTVHLTVHVNHKDGTHTVHTTDTHHFRNGKLTETHVHWDSRD

SEQ ID NO: 1036 - protein, 120 aa, synthetic construct
SDVSEEEVKEWFRREFEAFNHKDVDTWVDLFHDDAQIHFSDGETLNSREEIKQWFEKLIRELKDARIQVEDLHVDGDTVTVHYTLHVTHDNGQITVRVTTTVRFEDGKVKEKHVHYDRKE

SEQ ID NO: 1037 - protein, 118 aa, synthetic construct
ASEEEIKELLKRFYEAIDKGDMDALDELIHPDWTYTDASKQRTFSKEEWKKMVEELLKRSKDTRHQIHEIEIRGQTVTVHVTVHHTHGDETRTIHFTDHHTFKDGKLAHTRTHWHPKD

SEQ ID NO: 1038 - protein, 118 aa, synthetic construct
MSEEEIKEWLKRFYTAFDNGDADTVLSLLHPDWTYHNSNGITITSLEEFREWMKQWKEKAKRVHRQIDRIEIHGDTVTVHSTVHVHHDDRTVTIHVTDHHTFKNGKLTETRSHVDNGN

SEQ ID NO: 1039 - protein, 118 aa, synthetic construct
MSEEEIKEWFERYFEALDKNDLDKVASLYADDATVHFQDGITLTNKEEIKRWYKEWMSKVKRTAHEIHEIRVHGDTVTVHVTTHVHHDDRTITVRVTVHVTFKNGKVKEVRFHSDKGS

SEQ ID NO: 1040 - protein, 118 aa, synthetic construct
MSEEEIKEWLKRFYEAIDKGDLDALRELIHPDATFHFQDGSTITNADEFKKWVEEWFKQVKRVHREIHEIRIDGDTVTVTYTMHVHHDDRTQTRQATDTFHFKNGKLTEFRSHWNNQS

SEQ ID NO: 1041 - protein, 120 aa, synthetic construct
PSEEEIREIKKQFFEAINNGDMDKVKDLFHPDAQFHIFEGITFDSREEFVTWFTKKIREHFNTKMHLREVHIDGDTATFHYEVTHHHDDRTRTVRVTTHDRYDKRTGKIVESEFRMDTGG

SEQ ID NO: 1042 - protein, 121 aa, synthetic construct
DDREEIEKLDRQRLEALDRHDMDAFREYIHPDAEMHIHDSSGNTITFKTIDEIVEWFARVLSRYKDSRHEIKSVEFRNGTVTVHVTVTFNHDTGQVHIDVTYTMTYKDGKVTEVHFHYDNK

SEQ ID NO: 1043 - protein, 121 aa, synthetic construct
PEEEEIKEWKRRFFEALDNHDLDALRELFHPDAQVHFNDSSGQTYTYDTIDEIVEFFARVLSTLKDSRHEIKRIEINNGTATVHVEVHVNHDNGTKTRRVTSHDEYENGRLKRTQFDFDDQ

SEQ ID NO: 1044 - protein, 121 aa, synthetic construct
DWREELEELDRRRLEAIDRGDMDTLKELIHPDAEMHIEDQSGNQITFKTIEEIVDWFKKLWESLKRVHRQIDRIEFHNGTITVHVTVHVHHENGTRTITVTYTMTYKDGKVTEVHFHYRDS

SEQ ID NO: 1045 - protein, 117 aa, synthetic construct
MSEEEVREFKKRLAEALDRGDVDAAASLFHPDARFHHNSGETLNDLEEIKRWFREWFSKFPNVHRQIDSMEVNGNTVTVHVTVTVHHPDRTLHYRFTVHDHYKDGKLVETHVHENPT

SEQ ID NO: 1046 - protein, 118 aa, synthetic construct
PSEEEIKDWVQRFFEIINKTRDWDALKKLIHDDITMHIHNGITFTTRDEIADWWRKWFENNPEIHVEVHVHVDGDTVTVHWHVTVHRGDQQYHYTATTHIRFENGKIAEIRIHIRQWS

SEQ ID NO: 1047 - protein, 118 aa, synthetic construct
PSEEEIKTWKKRYYEEFFKTRDAQAAAEYIHDDVTIHFNQGITLHNREEIREWFQRWLDNFPRVQVHVEIHIDGDRVEVHVTIHVTHGDRDITYHVTYEDRYENGRLVETRVTINQES

SEQ ID NO: 1048 - protein, 118 aa, synthetic construct
PSEEEIKELDKQRIEALDNGDADTLAEIFHDGATFYHNDSQSRLNREQFREWVERWFKTFPRVHRQIDEIRVEGDTARAHVTVHLHNPTETITIHVTYEVHYKDGRLTELREHSDQKG

SEQ ID NO: 1049 - protein, 118 aa, synthetic construct
TSEEEIRRIIKRLAEAFDNKDLDALEEIYHPGATFTSKTSTHDLDLKEWKKRVEEHLSRFKDSRHEIKSIHIDGDTATVHVQAHFHTDSEDITIDVTSHFHFRNGKLTREKQDRDQKG

SEQ ID NO: 1050 - protein, 118 aa, synthetic construct
PSEEEIREILRRLFEAFDKGDADSFASYYDDGVEFTHNTHTQQFSKDELREWFERWHKTFKDVRHEIEEIRINGDTVTVHVTVTFHHDNRTTHQRVTRHFHFKDGKITHDREHRETRS

SEQ ID NO: 1051 - protein, 118 aa, synthetic construct
MSQEEIEELLRRFYEAVDKGDLDAIREIMHENATITHDHSTKDYSLDEIVDMVRQFKEKFPNVHRQIDEIRIEGDRAEVHVTVHITTSHEDQTFHVTHHWVFKDGKVVEMREHFEQRG

SEQ ID NO: 1052 - protein, 120 aa, synthetic construct
DQGTEAIEEWLRRFYTAINNKDADAIFELITPDATFHFHQPQTFTNAEEYKEWFERWVKSAGSYRVEIDSMEIRGDTVHTHVTIHVNHGDKTQTIHVTETHHFKDGKLVETHQHEDERPS

SEQ ID NO: 1053 - protein, 121 aa, synthetic construct
PSQEEIKEWLKRMYDLLNKGDADALASLFAPDWTYHHASGRTFHSLEEWKKWFEETFKRFEFHIQITGIHIENGTVTVHVTITVTNKDGETRHVDVTDHHHFDKDGRLKETRSHLDEKPQK

SEQ ID NO: 1054 - protein, 121 aa, synthetic construct
PSQEEIKEWLRQYYEAFNRRDLDKLEELLHPDATVHFSKGRTFHTKDEYKKWVEEFMKTFDFQIHIESIHIENGHVTVHYTVTVTRPNGETYHIRFTDHFRFDHDGRLVSVKSDSDERPQE

SEQ ID NO: 1055 - protein, 121 aa, synthetic construct
PSQEEIKQWVERFFELFDRGDWEQLAKMLHPDWTLHHYSGQTFTTLEEFIRWYQSFFSNFEFHHELKELHVENGTVTAHVRVTMTSKDGETRHMRVTEHHRFDHDGKLKETHVHVDTKPQE

SEQ ID NO: 1056 - protein, 120 aa, synthetic construct
PDEEEIRDIKRRYLEAIDHGDWEKAKKLFHPDATITIYHPDGKRETYDLEQMVEMIQRLLKQGDVRHEVKSVEFNGDTVTFHVTVTWHHNGQQHDSTVTYHDVYKNGKITETHIRRDDEG

SEQ ID NO: 1057 - protein, 120 aa, synthetic construct
PDEEEIEEILRRLYTAINEGDLDKWDDLFHPDATFHEYKKDGSSSTYDLEQWKERWRELQKSGDLHIQIESIHFDGKTVHVTYTVTFHHNGQQYHITYHDTYRFRNGKITEVHSQEDTHG

SEQ ID NO: 1058 - protein, 120 aa, synthetic construct
PDEEEIERILREHYDAFDKGDMDKVSKYVHPDATFHHYKSDGRTETYDYEQYMELIKQWMKRGNSSHEIKSIEFDGKTVTVHYTVHWTHNGQNHTVTATDHYHIKDGKITEVQSQEDSHG

SEQ ID NO: 1059 - protein, 113 aa, synthetic construct
PDTEEIERFVRRFIEEVDKSGDADAAKSYYDKDARIDFSGGQTYSLDQFREWVERMFKQGWEVEIKSIEVRGDTVHVHVTMHNRNTGQQVDVTRTFHFRNGKLVKDEIYEDPS

SEQ ID NO: 1060 - protein, 126 aa, synthetic construct
DEEELRERIKEIKTRFAEAMNKGDRDAIKELLHDDAQFTQSGNTFSLNLDQIAKWFEELFRQDVQVQVDEIHIEIKSKDEVTVTVHVTFHNKRTGSTVTATSHDRYQYTKDGVRLTESRMHSQQVT

SEQ ID NO: 1061 - protein, 126 aa, synthetic construct
DEEEIKKEVRKILKRFFEAFNKGDWETIKRLMHPDATYVNNGQQYKLNQEQWAEWVKRMNSNNFRIEVKKIDIEIKSKDTVTVRVEWTMHQDRTGRTFHGTTTFHMRRTKDGWKITRVEEHVQEQK

SEQ ID NO: 1062 - protein, 125 aa, synthetic construct
MSEEEIERIVRDWVRRFIEAMNRGDVDAVVELYHPDATFTDQNGQEYDLEEFRRWVEQMVRANVHIQLDKIDVEIKGTRHVTVTVHVTFHQEHGNQTYHVTSHFHFRLDDGRFYLTRERIETHST

SEQ ID NO: 1063 - protein, 125 aa, synthetic construct
SDEEEMREHIKELVERFYDAINKGDLDKLREILHPDATFHHANGQTYDKEDFLKWVEELKKNNTHVQIDSIEIHIHGSTEVTVHVHVTFHTEKGNETYKVTETHRFRLTDGQFYIVETHVETHST

SEQ ID NO: 1064 - protein, 125 aa, synthetic construct
TSEEEAKEEIRQWVRRWYEAINRGDMEKVKRMLHPDWTYHNQNGQTYDLDEFLKMIEELLRNDVRIQIDEIRVQIHGTTTVEVEVHVTFEFKNGGETYHTTDHHRFELKDGRFYLVETRVHMRST

SEQ ID NO: 1065 - protein, 125 aa, synthetic construct
YSEKEMEEAIRDLVRRFVEALNNGDLDALDELYHPDATFHHASGQTYDKEEFKEMVKELIKRNAHFQLDSVHVQIYGTNEATVEVHVTVHFEHGNETYHFTRHLHFRLEDGRWYLLEDHLQRHST

SEQ ID NO: 1066 - protein, 125 aa, synthetic construct
TSEKEIKEAVKDIVRALVEAFNKGDMDKIMSYYHPDATFHQYNGQTYDLEEFRQMVEKRLSQGVKVELKSIEIHVDGTTEVTVTVHVTFHFSNGNETYHATRHIRLRLEDGQFKIIEDQEHTRST

SEQ ID NO: 1067 - protein, 126 aa, synthetic construct
PGEETAERAAREVLRRWFEAFNKGDLDTLRELYDEDAKFTNIKEQQTYDREEFEKMVEEMMRHPFHIEVKSIEFQFNSDDEITVTVHAQVHFHDDPKTYDVTFHFRLRFEGDSWKIVEQRTQRDPT

SEQ ID NO: 1068 - protein, 126 aa, synthetic construct
PGEETLREEVKKVLKRYAEAMNTKDVDAIEELYDEDARLHIYATQRTFDKEEIKRWYEELMKHDFHVEIKKIDIQVDHNDQVTVTVHMTIHFRDDNKTVHVTAHFHMTYEGDRMKITEVELRHHPS

SEQ ID NO: 1069 - protein, 126 aa, synthetic construct
PGEETLKRLAKEFLRRLYEAFNKGDLDTILSLFDEDWRYHDTSQQRTFDREEFKEWVERLLSFPFRIEIKSIHFEIKSGDEITVTVHATVHFAHDPKTTHTTDHHHFRYEGDSLKIVETQESRHPT

SEQ ID NO: 1070 - protein, 126 aa, synthetic construct
PGEEEAEKAARELARRMYEAFNKKDLDKLLSLMDPNAQYTDANRNRTFDYEEFKEWVEEFLKYDFHIQIDSIEAQFHSDDEITVTVHVTIHFRTDPKTVHVTHHWHFRYEGDTWKIVRLQENRQPS

SEQ ID NO: 1071 - protein, 126 aa, synthetic construct
PGDEEAKKAIKEWLKRFFDAFNNKDLEKIERLVDDDVQFHFAETQKTYDKEEFKKWVEEMLRHDFRIEVKSIEIQADHNDEYTVHVHWTVHFRDDPKTVHVTTTFVFRFEGDDFKLVELRMRSHET

SEQ ID NO: 1072 - protein, 126 aa, synthetic construct
PGEETLKEQIKEVLNQFFRAVDEGDADTADSYLDEDWRFHNVSQQRTYDREEFREWVERFARIPFHRQIDSIEIQIDHTDEATVTVHVTVHESTDNRTYHVTEHHRMRYEGDTVKILRTHVNTQPD

SEQ ID NO: 1073 - protein, 126 aa, synthetic construct
PGNETLEEAAKRIVKALIEAFNNKDLDTLSELYDEDAKFTNYSTNQTYDYEEFQDMVEKLMRYDFRIEVKSIHFHFHKDDEITVEVHFTVHFATDNKTINFTSRFVIRYEGDTFKIVSEHVRSHHT

SEQ ID NO: 1074 - protein, 125 aa, synthetic construct
PEEDERAVRETDKRRWEAINNGDADKVKSLFHPDATFHQSNGTTYDLDEFREMVERLFKAKVQFQVDSMEIRIDDNGEVTVHAHGTAHRDDEGKTVHFTYTIRYRRNGDEWYIVEYRENRDEKST

SEQ ID NO: 1075 - protein, 125 aa, synthetic construct
NPEDEEAVRQLIRRFVEAFNNGDLEKLDSLYHDDARYHQQNGQTYNKDQIKELLERLMSQKVKFEVHSVEIRILDNGEVTVHVHGTFHFDESGQTTHATSTFFIVRRGDEYYIVSEELHTDNQST

SEQ ID NO: 1076 - protein, 130 aa, synthetic construct
PGEENLEEEIRQWVRREIEALNKGDMDTWASLFSPDVTFHDQDTGRDFDREEMIEWWERLLKSAKRWRIELKSLEVNVHGDHIEVHVHITFHWNQDSRTITVHVTSTDHFRLEGDQVKIVERHTSTDEKK

SEQ ID NO: 1077 - protein, 129 aa, synthetic construct
SSEKELKEIAKEIIERFYEALNRNDADTVASLLDEDWTYTQDGETYKFSRDEIKEWVKQMASQDMQLHIDSIEFQIHGTHTVTVTVHVTVHHRHGDKTHTVEVTDHHFFRFDGDEVKITETRSHRRPRD

SEQ ID NO: 1078 - protein, 129 aa, synthetic construct
SSEKEIEEAIRDWIRRYIEALNTGDLDTLKSLYDEDVTFTHDGNTYKMDQDQIKEWYSQFAKDGTHIQLDSIHIEIRGQHEVTVTVHITFHHNRGDRTETYSVTAHFHFRLEGDSFKIKEVREHTQPVT

SEQ ID NO: 1079 - protein, 129 aa, synthetic construct
MSEKELEEAVRDWFRKYFEAFNKGDLDALKSLYAEDATITHSGNTYHLSLDQIKDWYRKLLSQNVQMKVDSLEIRINGTTHVTATVHVTLTMHRGNKTQHVTVTYHFHFEFRGDEVKVKRVQAHHHPRE

SEQ ID NO: 1080 - protein, 129 aa, synthetic construct
TSEKEMQEIVKEVVERFFEALNKGDWEKVASLYDDDVTFTHDGETYKLSKEQVTEWVKKFHSADIQLQIDEIRIQIHGTNEVTVTVHVTMHQNHGDRTKTVKVTSHIRLEYEGNDFKIKEEHEHRHPVE

SEQ ID NO: 1081 - protein, 126 aa, synthetic construct
DDSEALERKVREWLRRFAEAFNKGDMDALRSLYAEDFTFQDSRTGQEYDLDELLKMLEEMFKNNVQMHVDHVEFQINDDGTITVHVHVTFTNETTGTHVHVTSTFHFERQDSQIKLKREHATHHQS

SEQ ID NO: 1082 - protein, 126 aa, synthetic construct
DSTKEQIEKIREIIQRFFDAVDTGNWEEIESLYDEDFRFHNSNTGQTYDLEELLRMLRQLTSQGAHHEVKSIEFQFNDDGTVTVTVHVQVHYESQGRTFTVTSHIHFVFEDKQIKIKEEHMTTDEH

SEQ ID NO: 1083 - protein, 125 aa, synthetic construct
DEEEAREAIKEIVQRYVEALNTGDMETIKELYHPDARIHFYAHNQTYDYEEFIRWVEEFLRRAKDIRIEIKHLEIKDTSDDSVTVEVHVEFHVGHETYTVTSHIRIKKTDGGWRIVEEHVRWHKQ

SEQ ID NO: 1084 - protein, 125 aa, synthetic construct
DQPEIQEAAKEILRRLYEALDHNDMDTLESLFHDDWRYTEAATQRTFDKDEFKEWVKEWLSRAKDVRRQIDSIEIKETGDDQVHVTVHVTIHVGTHTVHATDHHTFRKTDGGWRVVSTRAHYNQT

SEQ ID NO: 1085 - protein, 125 aa, synthetic construct
DTPEIQEEIEKLLRRFYEAYNHGDLDALDEMYHPDWRFTEAATQTTYDKEEFKEWVKQWLETFKDTRLQIDSIEFKEFGKDEVHVTVHVTMHVSHQTFKVTDHHTFRRDDGGWQIVRTQTHWNET

SEQ ID NO: 1086 - protein, 125 aa, synthetic construct
DDKDAEEEVRKVIRRFYELIDSGDVDALRELLHPDWRFHLASRQETYDKEEFVEWLRQWLSSFKDVRRQLDSLEVKDTSKTEVTVTVHFTMHVRHTTWHTTDHHHLRRYPGGWRIVETEVHMQQT

SEQ ID NO: 1087 - protein, 125 aa, synthetic construct
DTPEIEEAIKELIQRFFEALDHNDRETLKELFHPDARFHAASEQRTFNYEEFLRWVSEWLSRVKDVRHEIHSIEFKDFTKTEVTVTVHWTQHVGDTTVHGTTHIRFVRTDGGWKILEMRVQFHQT

SEQ ID NO: 1088 - protein, 125 aa, synthetic construct
DTPEMEEQIREVKQREAEALNNHDMEKIKELIHPDARMHVASENRTYDYEEIVEWFERFLRTFKDIQFQIDSLEFKEFGDDEVTVEVHVTVTAGDTTYTVTSTDRYKRTDGGWKLVETTIHIQPQ

SEQ ID NO: 1089 - protein, 125 aa, synthetic construct
DTPKDEEDVRQTDRRRIEAWNRGDIDKIRELFHPDARMHISATGETFDYEEIVKWFEEVLKKAKDARMEIESLHIVDFGDDQVQVTAHGTVHVGDTTVHFTYTIFYVRTDGGWKIVRVHVTYHQT

SEQ ID NO: 1090 - protein, 130 aa, synthetic construct
PSEEEIKEAIKDLLRRLMEALDKGDWETADRLYDDDATIHHEETQTTYNKEEFIRRIQERHRRGIRFQREIKSVEIRVDNGDTVTVTVHFQVHEHRGDKTRTLNITSHIRFVFEGSSVKITEEHVTTNQT

SEQ ID NO: 1091 - protein, 130 aa, synthetic construct
MSEEELREAIKEVIRRMMEAWDKGDWEKLRELYDDDATFHEISTQRTFDKEEYIRRVQELFSRGFQFHHEIKRIEIQINNGDEATVTVHYQVHTTHGDEHRTFDVTSHIRIRFEDSELKIQEEHVQTDQT

SEQ ID NO: 1092 - protein, 130 aa, synthetic construct
ASEKEIREAIKELLRQFYEALDKGDWEKLRELMHPDAQFHNGSTQTTYNLEEFVEMVQRFASQNIEVHRQIDEVEIQIDDGDRITVRVRVTVHHHHGDETRTVEIHNTDVFQLVGSRFYIVEHRSTTNQK

SEQ ID NO: 1093 - protein, 130 aa, synthetic construct
PDEEEQREQIRQTVRRLLEALDKGDWETVARLYAPDATITHISTQQTYDKEEFVRRVKRRHDNNVETHREVKSMEIRIDDGDHVTVTVHYQVHHHHGDKTQTVNVTSHIHVRFEDSELKIKEEHVQTDQT

SEQ ID NO: 1094 - protein, 123 aa, synthetic construct
VHPEDEEEIRQWVRRFYELLNRGDVDAVASLYHPDATFHHQSGRTFDREEFREWIEKFLSQGFQIQITGIEIHQKDGHITVHVHVTVHNSRTNTTYHFTQTFHFRLIGDSWYLLEDHLTTRQS

SEQ ID NO: 1095 - protein, 123 aa, synthetic construct
VHPEDETAVRELVKRWAEAFNKGDADAVASLFHPDARYHSQTGETYDRDEYKEWVQKFFSQGYQIHLEEIHIEQKDGEITVTVHWRLQDRRTGRTWQIDTHIHFRRFGDDWKITRMEVHTRQT

SEQ ID NO: 1096 - protein, 123 aa, synthetic construct
VHPEDEEAVRQALRRYYEAMNRGDWQTLRELMDDDWRYHQHNGQTYDLDEFIDWIRKFLSRGYEIHVTSIHIEQKDGEVTVTVHVTVTERQTNRTVNFQDHHHFRRKGDEWKIVRTETTTRQN

SEQ ID NO: 1097 - protein, 123 aa, synthetic construct
VHPEDEEEIRQWLRRFYEAFNKGDIEAIRRLFHPDARFHNYRGETYDVDEFAKWVKELISQGVRIEIKSIHIEQKDGRITAEVHVRVHHEQTNETFEVTHHWFFVKFGDRWYVVRVEERTHQT

SEQ ID NO: 1098 - protein, 123 aa, synthetic construct
DEDQKAAEEVDRRRLEAFNKNDMDTLKELFHPDAQMHVESEQRTYDYEQIIERMERRARHFKIQLDEIHVEVKDDGTVTVRAHVTVTQDDTGRTWEVTYTFFYRRKDGEWKIVEVRIRTEPQE

SEQ ID NO: 1099 - protein, 125 aa, synthetic construct
DQKKQEDQIREWKKRYFEAFNKKDLDTLEDLFRQTPDVRFHFNGTRYNLEQYKEYLERLLSNDVQIEVKSIEIRFDDDDHVTVHVHFTMHESKTGRTFHYTATDFYRFEGEQLKIVETRYHSDTG

SEQ ID NO: 1100 - protein, 125 aa, synthetic construct
DEKELEEAAREIVRRYYEALNKKDLETISRLFQSSKDAKYTQDGTTYDIEEFIEMVERMMSHDVQFHVESIEVRNDSKTEVTVTVHVQVTDKRTGRTFTVTHHWFIRKEGDEFKIVRVQAHTDTG

SEQ ID NO: 1101 - protein, 123 aa, synthetic construct
PSEEQQEKVKDWVRREVEAFNKGDMETWDRLFHPDSTFHMSNISREEFIEWFRRFFRTFKDAQMQVDSLEFKDASDTEITVTVHVTVHDDSTKQTWHFTFHDRFRFENGQLKLVSRQVHSQGS

SEQ ID NO: 1102 - protein, 123 aa, synthetic construct
PSKEDQEKVREWLKRYYEAFNNKDLDKIRELIHPDAKFHISNVDREQYLEWVERFLKRFPDVHMQITSIEFKDQSKDTVTVTVHVQVHDRSTKTTIHSTEHHHFRKKDGQFYLIETQVHTDGS

SEQ ID NO: 1103 - protein, 126 aa, synthetic construct
YSDEEVKEEIKKWLERFFKALDNQDLEAVASLFSPDWTYHNTDDNKTYSRDQFKKLVEEFLKTFPDVTHQIDSIEFQKNGDGTYTVHVHVTVHFKTETQTFTETHHFEFTKDGWRIVETHHTTVPT

SEQ ID NO: 1104 - protein, 125 aa, synthetic construct
MSEEEIRQAIKELVERYVEAFNKGDVDALARLYAEDAKYHHASGQTYNREELKEWYERFMSQQWEMEIKSIEIEVKGRTHATVHVHITMHNQRTNETYHVTQTFHFELRGDEFKITEVHTTTHKT

SEQ ID NO: 1105 - protein, 125 aa, synthetic construct
MSEEELREAVKDVIRRWVEAFNKGNADEVYELYHDDFRFHHASGQTYSRDEFKKWVKEMFDNNFQVTNQSVEIRVEGTTHVTVHVTMTVTQKSTNHTWTFHSTYHIQFEGDELKITEQHTQTDQD

SEQ ID NO: 1106 - protein, 125 aa, synthetic construct
PSEEEIKEQIKQLVERMIEAFNKGDADLFYSLVHPDWKYHNNNGETYDRDEFKKWLKEAHDAGIQVTNDSLRVEVKGKDEVTVEVHLTFHDSRSNETYHVTEHHRFRLHGDQWYLTRTHAHTNKT

SEQ ID NO: 1107 - protein, 125 aa, synthetic construct
MSEEELKRAVEEFVRRFIEAVNKNDLEAIKELYHDDFTFTTSNGETYSKEEFIEWVERMVSANLKFDLQSLEIRVRGTDEVTVHVHVTVHDSRSNTTYHFTSTMHFRFEGDELRILREHLQTDQT

SEQ ID NO: 1108 - protein, 126 aa, synthetic construct
PDEEQQRKAKETVKRWVDAFNNHDREAFKEMYTPDATNSSYGLNYEQIIEFITRILQTFPRVRVHIDSIRVELQPDGTVVRVTVHLTFHFYKDGKQKTVKITYHFQLVFENGSVKIVNQQEHSDDS

SEQ ID NO: 1109 - protein, 126 aa, synthetic construct
ASEEDQRKIKEVKQRFIEAFNTGDLDTIRKLVHPDARFAAYQVDLDQFIEWVTEVKRQFPNMQVTVDSIEVRADPSGEEITVTVHVTFTTTHNGETHQFRGTYHDVYRKENGEFKLVNSQESSDNS

SEQ ID NO: 1110 - protein, 126 aa, synthetic construct
PSPEDQKAIKDVKRRYMEALDKGDMDALSELFHPDFTYAARNLDYDEFLEWVKQWLSRFPTARHKIDSMEFRLHPNGEEVTVTVHVTVHHTHNGRHETVTVTAHDVYRKKDGEFKIVRTREQRDNS

SEQ ID NO: 1111 - protein, 126 aa, synthetic construct
PDEEEQREIKRILEELAEALDKGDFDTFLSYFDKDWRYSAQNIDYEEFEEWVKEYQRRFPNVQRQIDEIHFHLDPSGEEIRVTVHVTVHHHHNGKTDTQTFTEHHLIRKENGSFKFVETKTQTDNS

SEQ ID NO: 1112 - protein, 126 aa, synthetic construct
PDEEAQRAIKELLQRYFEALDHGDLDTLRSLFDEDWRDSSRNLNLDQFAEWVEKFFRRFPNARHQIDSIEIEQHPNNRTYRVTVHVTVHFNHNGKTKTVTVTEHHVFVKENGSWKIKHTTTHRDHQ

SEQ ID NO: 1113 - protein, 126 aa, synthetic construct
ASEEDQKAIKEIVERYMEAFDKGDLDTIRELVAPDATYRGLNIDYEELMEWIKRWAESFPDVHREIEEIRVELDSNNRTFKVTVHWTVHVNHNGQTFTVRGTTHIVLEKQDGSFKIKSMQTHVDNG

SEQ ID NO: 1114 - protein, 126 aa, synthetic construct
PDKEDQEEIKKTKQRMAEALDKGDRDTLRELFHPDFTFKARNIDYEEFIDWVTEWVKSFPDTKREIKSIHIEQVPEGHTYHVTVHLQVHTNHNGKTTTQRYTSHDRYRKENGSFKLIESQVHTDND

SEQ ID NO: 1115 - protein, 128 aa, synthetic construct
DSEDEQREAVKEVLKRFYEAVDKGDLDTLEKLLHPGARFHDTSKGQTYDQEQFKERVERQVRNNIQREVHVQRIQIDGTHEVTVTVEVHVHEHHGDETQTHTFQEHHTLRQKDDTFKIIETRITSYQT

SEQ ID NO: 1116 - protein, 128 aa, synthetic construct
PEKELEEAVREWVEREVEAWNKRDADTWASTLDKDSKYHQTDGPTTYDWEELKEMFERTASSDFHIQITSMEVRIIDDTRVTVTVHVQVHQTHGDQTKTVHITYHLHFEFHNGELRLVEKHSTTDEKE

SEQ ID NO: 1117 - protein, 128 aa, synthetic construct
DPKELEEKVREWIRQWVEALNKRDLETLKSLYDKDSRVHTTSSPQTFDADQFTEWLKKYASINFQIHITSLEIRIIDDTHVTVEVHVQVHETHGDQTHTIRFTYELHFRFENGQIKLVSQRETTDTSE

SEQ ID NO: 1118 - protein, 129 aa, synthetic construct
PKDEEQAEQIKDVKRRLIEAFNKGDADALSELFHPGAQFHNSEEPRTYDQEEFREMVERAHRNDVKVQLDEVRIQKVDEDEITVTFHLTVHFTHNGQKVTIKITFHDRYRQTKDGWKVVETHVTEDPKE

SEQ ID NO: 1119 - protein, 129 aa, synthetic construct
PQEDELREQAKELLERFYRAINQGDLKAVADMYTPGWTYHNSEEPRSYSKEEFIEMLKELLKNDTKHHIEEIEVEVKDENEVEVTVHITVHSTHNGQPYTVRVTDTHRFRYEKDGVKIVETHTTTNPTE

SEQ ID NO: 1120 - protein, 129 aa, synthetic construct
DKEEMEEAVRQLIKRFYEAFNKGNLDEVASLLDEDWRYHSGQQNQTYSKEEFLEMVEKLIKAGTHLHITSIEIHFDDSRGEVTATVHVEIRTTKDGREKTVKTTDTHHFRQENGSWKIVETRVSRDEKD

SEQ ID NO: 1121 - protein, 132 aa, synthetic construct
TSEEEIREAVKDWVRRYFEALNHGDVDAVASLYADDARLTDASTGQTFDKEEIRDRIEKFFKQSDFRIQVEDLHIEIDKDGGHATVHVHFTIHVTHKNGETRTVHITSTFHFQFEGKELKLKEEQVHRDNGG

SEQ ID NO: 1122 - protein, 132 aa, synthetic construct
ASEKELREAVREWLRRYYEALNHKDLDKVVSLFDDDWRVDFSETGKTYDKEEYREMVERFMSNSDFRIEIKSIEIRVDPSGGHVTVHVHVQVHVTDKTGRNHTVDTTDTHHFRMEGDELKIVKTEFRFDHGG

SEQ ID NO: 1123 - protein, 120 aa, synthetic construct
PMSEEEIKEFVKRFYEAIDRKDAETLRRLLHDDATMHVSNGEQYDSLDSIIERWYKKFVSHAERARHEIKEIRFDGDTVTVHVQVHLTHSSGTQTYNVTDHYVFRGKRITEIRSHWNPQE

SEQ ID NO: 1124 - protein, 119 aa, synthetic construct
PGEEKLKELVKRYVEAFNNRDMDALKSLFAPGWTFHDQSGVTFNNRDEFVEYWLKTLMSRFKEFHMNIDEIRIDGDTVTVHITVHWHHDGETRTQHFTEHHHVRGDKITETHQHFDQRG

SEQ ID NO: 1125 - protein, 116 aa, synthetic construct
PSEEEIRQLVRRLVEALNNRDWEKFASLFHPDATIHVNGQTYSNAEEAARQFVEKFAKTFPKARIEIKSLEIDGDTVTVHWTAHVSDEPTTFHGTTHIHVRGKKITRMQIHIDSQP

SEQ ID NO: 1126 - protein, 116 aa, synthetic construct
MSEEQIRQWVREYVEIFNHKDIDALASLYDEDARIHYNGQTYGNYQEAAKKIYSEIFRTFKNARLEIKRLHIDGDTVTVHVTMHVTDQPTTFHMTVHFHFRGNKLVEVHIHVDQHD

SEQ ID NO: 1127 - protein, 119 aa, synthetic construct
PTSEEQIREWKKRYIEAWNKGDADKLEELFHPDAQVHFGTEGQTFDTLEQFKEFFKKMMSNNSQIEVKEIHIDKSTGRVTVHFTMHVNTDSQTYTFHATSHDRYENGKITEHRTQFDPQ

SEQ ID NO: 1128 - protein, 119 aa, synthetic construct
PISEEQIKEWLKRYFEALNKGDLDKLKELLTPDWTFHLYAENKTFTNLEEFLEWVKQMLSLNIRIEVKEIHIDRSTGRVTVHVTVHMHTDSQTYTFHATEHHQFENGRLKETHQHVDPK

SEQ ID NO: 1129 - protein, 118 aa, synthetic construct
SLQEEVEEWVRRWVEAINRGDLDAVASMYAPDATMHVSAEQVTFNSRESIKKFIEKLVKAGFRFEIKEIRIEVKDGTATVQVHLQVHDESTNRTFHVTSHFHFENGKLKEQRTTWNET

SEQ ID NO: 1130 - protein, 118 aa, synthetic construct
SLEEQARQIVKRLIEAFNRGDMDEIFELYSDDATVHFTHENVTFHTREAIKKWFTELFSQNWHVQLDSMEVEVKDGTVTVHVHVTQTQQDTKRTRTVTSTFHFKDGQLKEEHVRWHQT

SEQ ID NO: 1131 - protein, 118 aa, synthetic construct
PDEERAKDIVKKFYEALNTGDWETAVRLMHDDARFTVKSENRTYTTKDEITEWIRRFFSQNIRIEIKRIEVETKDGTVTVTVHVTLQDKRTNRTFDATHHWHFKDGRLVEVRQQVDER

SEQ ID NO: 1132 - protein, 120 aa, synthetic construct
TSEEQMKELIKRFFEAVDKHDMDKLDELVHDDATYHDYRTNRDYDKEELKELIREWLEKATDVRHEMENPDFRFHGDTVTVHWTVHRTQNGQDFTVKATTHFRFTDGKLVELRVREDDKS

SEQ ID NO: 1133 - protein, 117 aa, synthetic construct
PADEEQIKEWIKRFFEAFNKKDIDALANLFHPDATFHFYDGTTFHSQEEFRQYMEEFFRQFPRTHVQIDSIEFRGDEVHVHWTMTLHKDGQQYHIRYTTTFRFRNGKITEVHFQEDS

SEQ ID NO: 1134 - protein, 119 aa, synthetic construct
PSEEEIKEFDKQRFEAFDRGDWEAVAKYVHDDATFTHNNRTYPMSRDEFTEWVKRFLRRFEEMHREWDSNIEVRGHTVHVRFTVHFTQNGKTQTVDARYDFKYRNGRLTRVETQRNTKD

SEQ ID NO: 1135 - protein, 119 aa, synthetic construct
MSEEEIREWVRRFMEALDKGDWDALKKLLDKDSQIHFPESQKTYDLDQFVEWYKRFKRTTDRTQRHVDRIEIHGDTVHVHWTLHTTHQGDTYTFHGTTTFHFRNGKLVEVRFHVDSHKT

SEQ ID NO: 1136 - protein, 123 aa, synthetic construct
MSQEEVKELLKRFYEALNQRDADKAASLFTPDATVHFFHGSQQDDITSLDQLKEWLRRWLKKFPDTKIEVKEIRVDGDTATVHYTVHQTQGDQPQTMHATDHYHFTDGRIKEVHSRFDPSAFT

SEQ ID NO: 1137 - protein, 119 aa, synthetic construct
PQEEINKELIKRFMEALDKGDVDAAAELFHPGWTLHHSSGQTWTTKEEFREWVERLQKSLKDVKREVHIHINGSGTVTVHSQVHVTDDTGQTYTIDFTEHHHFEDNRITETHVQTDNQN

SEQ ID NO: 1138 - protein, 119 aa, synthetic construct
PDEEKIRELLRRYYEALDKGDFDALREILHPDWTFHDSDGTTITTKDEFEEWVREIQSRWKDIKREVHIHINGNGTVTVHVTVHMTHDNGQRTTMHVTDHHHFRGDKITETHAHTHQEQ

SEQ ID NO: 1139 - protein, 127 aa, synthetic construct
PKEEEMRRQVKEWVERYFEAWNRKDLDAIMSLFSDDWTYRDSRTGRDFDYEEFREWVEQWLRKFEDAKLQIDSITFHIDGDEITVTVHVTITDSSTGRTWHVTEHHHFRFTKDGLQIVETRVQHDQT

SEQ ID NO: 1140 - protein, 118 aa, synthetic construct
MSEEEIKEIVKRLYEAFDKGDLDLLRELYDDGAEIHFYGQNITITDKDEFTEYVKRLFDNADTAHQVHIHISGDGTHATVHSHYHRTHNGQTHEQTVTSHFQFRDKRITEEQVHFNQN

SEQ ID NO: 1141 - protein, 129 aa, synthetic construct
PDDTLEEQIKELKRRFVEAFQSRDPDKLRELFHEDVTFQHRHRSTTLGRDEYKEWVKRFIETFKDFRVEIKDMEIRATENSITVTVHVTFTFHHDSETKHYHATYHDEYEYKDGTVQLVRSQSNMHQEN

SEQ ID NO: 1142 - protein, 129 aa, synthetic construct
PDSDIEEAIRQWFTHWLRAIDEGDADTLKRLYDDDVQFHHDNSTYKLDREQIAQWWREFFSTFKDVRHELKSMEIQSDKDHVTVTVHVTTTFHGDTSTHHFHATYHFFFRFQNGRLFLTRQQEHTQQQN

SEQ ID NO: 1143 - protein, 129 aa, synthetic construct
VDKDQQEAIRQWLRRYFEAWDKGDADTVASLFDDDWTIEHSNETKNIDREQYREMFESFFRTFKNVQHHMESVEIRADKDHVTVTVHVTMHVTNDDQKQTYHATEHHHFRFENGELKIKHTQTHTNNSS

SEQ ID NO: 1144 - protein, 119 aa, synthetic construct
DEQKEKIKDIIRKLIEAIDKGDADTAKSLYAEDATVHFSNGITFHSPDEFREWVEKFNKNTNARREFEIHIDDSTGTVTVHVTMHVNQGDQTYTVHMTRHLQFEGDKLREDRIQMHQQD

SEQ ID NO: 1145 - protein, 119 aa, synthetic construct
DEHKEKIKEILSRFYEAFNKNDADALAELLHDDAQIHLSNGTTFNNKDEFRKWFEEFQSKFNTQVEWRIHVDDTTGRVTVEVQYHTTHGDQTHTADATEHHRLVGDKITETRTHIDQQD

SEQ ID NO: 1146 - protein, 119 aa, synthetic construct
DEMEEKIRQILNRYYEALDKGDADAIFELLHDDWRMHSSDGTTFTDRHQFKEWVEKFNKEFNSRREWEIHIDRSRGTVTSHVRVTLNQGDKQTHFTVTETHRFRGDRITETRAHYDTQE

SEQ ID NO: 1147 - protein, 126 aa, synthetic construct
DDEEEIREKLRQWIREFIRAVNEGDRDALKELYHDGATMHHASGRTWTTKEEIAEWFKQFTDQGFRLEVKSLEIQVDTDGSATVHVHVQVHQENTGRTFDFTSTFHFRFENGQMKLQEERIQTDEQ

SEQ ID NO: 1148 - protein, 126 aa, synthetic construct
DSEKERQEKAKEWVRRYIEAFNRGDMDALAELFWDGWTFHHSNGQTFTTRDEFREWAEKLFSNDVQVEIESIEVQIDDNGRATVHVHVTFHFRRTGRTVTATETHHMEFHNGQLFVRETRAHWHQR

SEQ ID NO: 1149 - protein, 126 aa, synthetic construct
DSEEEIKEKIKEFVRREIEIINRGDLDAWKSLFTPGSTMHINNGRTFTTQDELKEFIKELFDNQLQFEIKSLEIEIDSDGTATVHVEVEVHEERTGRTVTVRYTDRIEFHNGQMKIVERHITHNQQ

SEQ ID NO: 1150 - protein, 126 aa, synthetic construct
DSEDEIKEKIKEFKKQLLEAFNKGDADALAELFTPGVTVHHSSGQTFTDLEELKEWMEKFTASGFQMQIDSLEIHVTEDGSATVHVHVTVHNESTNETYTVTFTDHYRVENGQLKITETHIYVHKQ

SEQ ID NO: 1151 - protein, 123 aa, synthetic construct
DEKEMKEAAEELIRRFYEALNNGDADAAKSLFDEDKAEMHINGQTFNNADEIKKWIKEVFDNNTQLHVHSIHIQTHDDGTVTVTVHVTVTTNGNTTTVTHHWRFQQEDDKFKIVEVHQQTDQR

SEQ ID NO: 1152 - protein, 130 aa, synthetic construct
ADEELQEQIKEWLKRYYEALDKGDLDTVLSLYAEDATVHNSNGQQVHYDEWVKRYIESLMKRFDSTRREIDEVRIELRGDTITVTVHVTMHFTHNGKHTTVHVTQHFHFKLETSDLKLKRDQVHNDSNSD

SEQ ID NO: 1153 - protein, 130 aa, synthetic construct
TDEEAQRDIKEWLERFYESIDRKDLDKIRELVHPDATFHNSDGQRVPADEWVDKFYETVVKAFDQVHHQIDSIEIRQDGNTFTVTVHVTVHTTQNGQTYTFHVTHHWHFKKDSKEFKVTHMEEHRQQNKD

SEQ ID NO: 1154 - protein, 124 aa, synthetic construct
PDQETREAIKEWKERFIEAINKGDMDTLKELVHPDATFHFNNQTFTDREEFAKWVTKMNRDGFRVEVKEIRISQHGDTATVTVHLTFTNEQTGSTMDVTAHDRYRRSNGSWKLVETHFHIQEKS

SEQ ID NO: 1155 - protein, 124 aa, synthetic construct
ADKETQEAIKELIDRFAEAFNKGDWETLKSLFHPDARVHVDNQQFTTLDEIAEWAQKMFSQNWEVEVKEIHIELRGDEAHVTVHWEFHQQDTKTTVHVTTHITVRRSNKDWKIIRMEVRRNQQD

SEQ ID NO: 1156 - protein, 124 aa, synthetic construct
TDPSDQEEIKEWKRRFLEAINKGDLDKVKKLVHPDATFHFNNTTYTTQEEIAKWVKEMFDQKWHIELKSMEIQKDGNEAHVTYHVTFHQEDTKTTVDVQAHDRYRKDNGDLKLIESRFHHNQKD

SEQ ID NO: 1157 - protein, 124 aa, synthetic construct
TDEEAQRAIKDWFRQHVEAFNKGDMDKLASLYHPDATMHIDDQTFTTREEIKKWFEELFRQKFRIEVKSQEIQQDGDEYHVTTHVTLHQEDTKRTSDVTRHLRFRRSNGDWKLIEDRAHRNTKE

SEQ ID NO: 1158 - protein, 124 aa, synthetic construct
MSEEEIKEEIKQWKRRFIEALNHGDVDAILSLFHPDATFHHARGQTYNREQFKEWLERFASNSDLRIEVKEIRIEIRGDEIHVTVHFQVTNPQTKTTRTFTQHDRYVLSKDLKLTELQTHTHDG

SEQ ID NO: 1159 - protein, 118 aa, synthetic construct
MSEEEIKEWLKEFFRALDEGDADTVAELLTDDSRLHIESEQVTYNSKEEIREWVERARSTFDAQREVHIHINDDGTVTVHWTVTTHHNGRTHTFDGTTHFHFKDGKLVEVRITVHQRD

SEQ ID NO: 1160 - protein, 125 aa, synthetic construct
MGEEAAKEQIKEWVRRYVEAFNKKDLEALESLYTDDAQVTFNETQRTYDKDEVKRWYEKVLKADHQIQIDSIEFRTDDDTTFTVTVHMTVTNDKTGRTFRVTFHFHFQRDSSQLQLTHLQVQIDK

SEQ ID NO: 1161 - protein, 127 aa, synthetic construct
PSEEAQQAVREIIRRFYEAFDNNDLDTLKSLMHDDWTFHNASQQITFKSREEFLEWVKEFLKTFPDLKHEIKSIEIHQHGSTIQVHVHVTVHFGHSQQTYTVHDTHFFQKHKDDYKIVETRSHVDQA

SEQ ID NO: 1162 - protein, 127 aa, synthetic construct
PSEEDKERIKEVLRRFYEAFNNGDADALASLLHDDATMHSEYNQITFTSKEEIKEFFKEFLKRFPDTEIEIKSIEIQQHGDYYTVTVHVQVHVKAHQQTYRVTHHWVLQKNGDDFRIVHVRERIDQT

SEQ ID NO: 1163 - protein, 128 aa, synthetic construct
PSEEDQEAVKEWVRQWIEAWNKRDADKVASLYHPDATFTHNNETYDLSRDEFKEWVERWMRSFKDFSLELKSMEIRKSGDTITVQVHITIHYGDNNQTVDVTYHFFFRKENGSYKLIRQRTHRNERKE

SEQ ID NO: 1164 - protein, 128 aa, synthetic construct
PSEEDKKAIEEIIRRYYEALNEGDMDAIAELFHPDATFHEDNQTFDLSREEFKKRVKEFKERFPDVEVRIDSIEIRQSGDTITVTVHVTFHFGKNNQTYHVTHHWFFEKQNGDYKITELREHRNNANE

SEQ ID NO: 1165 - protein, 126 aa, synthetic construct
DREEREKQVRDWLRRFFDAVNKKDWKALMDMLAPDWRFHESNGVTLNNKEEFREWFERLMSNDVKIEIKSMEIRVHGDHVTVTVHVQVTHDSTGRTFRVTEHHHFRFTDGKLRLIETRVHHDGGEG

SEQ ID NO: 1166 - protein, 126 aa, synthetic construct
DTPEDQEEIKQFKRALVEAFNNKDWEKVVEIIDEGATLHFSNGITLTTKEEITEWVRQFLSNDTKIEVKSIEIQKHGDEARVTVHMDVTFDRTGRTFKVTAHDRYKKTDGQLRLVESRFQFNGGEG

SEQ ID NO: 1167 - protein, 126 aa, synthetic construct
DEEEMKRAAEEFLRRLYDAFNKGDWEALLRLFADDWTMHISDGETYTTKDEFREWVERMLSNTAHFQIDSLEAEVSGNTVTVTVTVTVTHDHTGRTFTFHDTHHFQFTDGQLRLVETRIHREGGEG

SEQ ID NO: 1168 - protein, 127 aa, synthetic construct
PEEETRRQIEEWLHRFYELLDRGDADALAELIAPDAQYTDTNSNRTYDQEEFKEMVEEFKSKFPDSQHHIKSITFHQSGDEMTVTVHVEVHYNGSNQTVRFTDHYRFRKTKDSVRVVELRSTTDNTS

SEQ ID NO: 1169 - protein, 127 aa, synthetic construct
MDKEAEEAIERLVRAFMEAMNKNDLETLKRLLSPDAKYHNSDTNRTYDQEEFFEMMERFMRTFKDFRIEIKSMEFEVHGDQIHVTVHWELHLTGSGQTQEFTTHITVDRTKDSFRIVSWTETTHNKG

SEQ ID NO: 1170 - protein, 127 aa, synthetic construct
ASEEEAKEWIKQWVRREAEAWQNKDLDAWASLFHPDSQVTHSDEQRTFDKEELREIVERILRRFEDVSVEVKSLEIRFHGDDVQVHVEVTFHFSGSNQTRNVRYTDRFRIENGQFKLVSRTVTTDGT

SEQ ID NO: 1171 - protein, 127 aa, synthetic construct
TSDEEAKEALRQVVRRFYEALDNHDWEAIARLLDDDWTFHNADEGQTYDKEEFIEWVKEWLKRFDNFRHQIDSLEIEKRGDEYTIHVHVTVTFDKSNTQHRTTDTHVIRQENGRWKIVETHMQTDGT

SEQ ID NO: 1172 - protein, 127 aa, synthetic construct
MSEEEQREAVKDVVRRYIEALNKKDLDALLSLFDEDWTYTNANENQTYDKEEFREWVERFLKTFPDVKIEIKSQEIEFRGDTITIHTHVQVHFAGENQTVDVTETHHLELENGQFKIKRTQTRTDSS

SEQ ID NO: 1173 - protein, 129 aa, synthetic construct
SEPEQREKVKEWVKRFYEAFNRRDLDELASLVHPDGTFHHNNQTFHLGKDAFKEWVKEFLERFEDVKIEIKELHVEVNGDTVTVEVHVTFHFHHKDRTQTRHVTDHYHFRFENGELKLVSVQSHTDTRD

SEQ ID NO: 1174 - protein, 127 aa, synthetic construct
PETEEVKEQIKEWFKRYAEAWNKKDWQTLAELFDPNSEFHFAETQRTYDWEQFVEWVQRLLSRASSARMELKSLRIEQRGDTFHVTTHWEVHYSETKETYHATTHLTFKKENGSWKLAHFQIHTQKT

SEQ ID NO: 1175 - protein, 127 aa, synthetic construct
PEKDEAEEAIRQWVRRYIEALNKKDWKKVADLFHPDATFRDSREQRDFNWEEFVDRVKKLLEHLSSSRIQVDDLHIEQRGDEFTVHVHWTQHRDETKTTFHGTTTLHFRKENGSFQLKEMQTTTQQT

SEQ ID NO: 1176 - protein, 127 aa, synthetic construct
PEEKEAREKIREIKRRFAEAFNKKDWKTLADLVHPDSTMEDQSTQSEYNWEQLVRIVRRRLESLKSFRVEIDDMEIRAHGDEFTVHVHMTLHRSDTKTTYHIDATDHYRLKDGQVRLVRSTFRTQPS

SEQ ID NO: 1177 - protein, 127 aa, synthetic construct
PGEEAMEEAIRRIKRRLVEAINNGDWETVLRLFDPNATVHFSKSPQTATTLEQIRRFVEEFLKANAHFEIKSIHIQFDSENTVTVTVHITVHFDNTKTTVDVTFHDFYVRKDGQVKIVETRIQFDHT

SEQ ID NO: 1178 - protein, 127 aa, synthetic construct
PGREEQEEQIRQMLRRFAEAFNNGDVEALAEMFDDDWTVHFSQSNTTFHTKDEFKKFIKELLSQAWRMEIRSIEIRFDSDNEVTVTVHVTFQNEKTGETVDVTEHHHFRFENGSVKLVETHIQFDHK

SEQ ID NO: 1179 - protein, 129 aa, synthetic construct
PEEEEDKRQIEEIDRRRIEALNHGDADAVLSYFHDDAEFHYSATNTTLTTKEEIREWFERFISIPFRIQIHSIRVELDGNGQYTVHATVTVTHRPTGTSVTFTYTIKYRRTKDDWRIQRVQIHYDDGGD

SEQ ID NO: 1180 - protein, 122 aa, synthetic construct
ADPKAQEDIRQWVRRFYEAFNNNDMDALKSFYDEGATMHLWNGQTFHSQDEIKKWFAEMFSSGVRLEIKSIEIHQNGDEFTVTVHVQAHTSHSTYDVTQHFFFEREGDTWKLKRDEIRMHQT

SEQ ID NO: 1181 - protein, 115 aa, synthetic construct
PSREEIKELLDRMYESLNRNDVDTFVSLFAPDWTLHIYQGKTFTTLDEVKEWVEKWLSDWTGSRIQIDRMEIHGDTVTVHVTQTLSKTGTTVTITDHHTFQNGKLTETHSHEDST

SEQ ID NO: 1182 - protein, 115 aa, synthetic construct
MSEEEAKEWVKQFYEALNNGDMDAVASLYTPDATYHVWNGQQFDTRDEVKEWFEKYFKSAKDAQIQIDDLHVDGDTVTVHVTQHEGHSGRTFTITQHFEFTNGRLKRDETRRNQQ

SEQ ID NO: 1183 - protein, 125 aa, synthetic construct
PSDEEIAETLVKRYIDALNRKDIDELASLYTDGSRIHIHNFRGETINIRDKDEYRKVVEKMLRELEDVHFEIKEIRVDGDTVTVHVTMHVTDSSTGKTTTVNVTQHIQFKDGKIVRHEAHFNQTD

SEQ ID NO: 1184 - protein, 125 aa, synthetic construct
PSEEEIAETVNKRIADAFNRKDLDKLVEIFTPDWQAHITNWTGNTVTFHSLEEFREWAEEWLKRFQDTHIEVKETRVHGDTVTVHMTVHTTDKSTGKTTTINVTEHHHFENGRLVETHIHIHQTD

SEQ ID NO: 1185 - protein, 113 aa, synthetic construct
ASEEEIRELIRRLVEAFNKGDMDAIKELYDDGATVHFWNGRTFTSKDEIKKWFASMQKDIRLQITRIEVDGDEGTVHVQVHNNSNPKTFDVTSHIRFKDGRIKSERVHMRETD

SEQ ID NO: 1186 - protein, 113 aa, synthetic construct
PSEEEIKEIIRRFVEALDKGDADAALSILHDGWQLHVYNGQTFHSREEFKKWVESLSKDTHRQIESIEIRGDTVTVHVTVTHGENPKTFKVTEHHRFKDGKITETQIHMNQTD

SEQ ID NO: 1187 - protein, 113 aa, synthetic construct
MSEEEIRETVKREAEIWNKKDWEAWASLFHPGATMHHSNGQTWTDLEELTRWFQSIDRSVKVQIDSIEVRGDTVTVHMTFHNNKNPQTFHVTVHIRFKDGKITEKHIHTNQTD

SEQ ID NO: 1188 - protein, 113 aa, synthetic construct
MSEEEIREVVKRFFEALNKKDWEAIKRLLHPGVTIHHSDGRTFTDLEEFAEWVKSLDSNLRIQVESIHVDGDTVTVHWTVHNGKEPRTFRVTTTFHFKDGKITEIHVHRNQTD

SEQ ID NO: 1189 - protein, 120 aa, synthetic construct
PGEERIKEFLRRLFEAIDRGDMDAIKELFAPGARMHINNQTFTTLDEIRKWFEEMFKSLKNSRHQIDSIEITGDTVTVHWTLHVTHEDGSTVTMRATTHFTFDKDGRLVEMRIHEDQDDR

SEQ ID NO: 1190 - protein, 117 aa, synthetic construct
MSEEQIRQIVRRLVEAFDKGDWKTLKELYAEDATVHFSKGQTFTTLDEFAEWIRQFASNWDLQRQIDRIEFNGDTVTVHLTVHRHHGDRTITVHVTSTFHFKDGKIKEEHIRWDERE

SEQ ID NO: 1191 - protein, 117 aa, synthetic construct
TSEEEIKQWIEEFFRAIDQGDAEAIKRLFHDDARLETNRGEEWTTPDEIAEWFKRVWENWDSNHEIKRIEFNGDTVTVHWTAHRNHGDKTVTLHGTTHIRFKDGKVTEMRIHVDEHD

SEQ ID NO: 1192 - protein, 117 aa, synthetic construct
PSEEEIKEILRRFYEAFDNGDLDTLKELLHDDWQFHESSGRTFTTLDEFLEWVKKVIDNWNTAHHIERIEINGDTVTVHVTVHRHHGDRTITVHTTDHHTFKDGKITRTEVHWDERE

SEQ ID NO: 1193 - protein, 117 aa, synthetic construct
TSEEEIRETIRRLVEAFNKNDWEALARIYDDGFTFRWSNGETLTTKEEFVRWVQEMIKNSDTKVEIKSIEIRGDTVTVHVQVHTRHGDKDHTVDVTSHFVFKDGRLKEEQFHTDQRD

SEQ ID NO: 1194 - protein, 120 aa, synthetic construct
SGEDQERIEEWVRRWIEYMFKTGDADTVASLMHPDWTFHLYNGQTFTSLEEFAEWVRQWWSQFPDAHVEIKSVEIENGTVTVHYTVHVTHNGQPYTFHVTEHHRFKDGRLTETHQHRRNT

SEQ ID NO: 1195 - protein, 120 aa, synthetic construct
SEEDQERIEEIKRRMIEYLIKTGDVEHFASLLHPDAQLHVDSGTTFNSREEMKEWWARFFKNFPDVRVEIKRIEIQDGHATVHVEMHATHNGQKYTFHQTQHDRYKDGRLTESHIHTETR

SEQ ID NO: 1196 - protein, 120 aa, synthetic construct
MSEEQIERWIRRMFEAWNRGDVDKLVELYTPDVEVHYFHGNETYTFTTLDEIKEWLQQLFERFEFHIQIHEIRTNGDTVTVHVTVTFTHGDETYHMRVTRHFHFKDGRIKEDHIHFDQKQ

SEQ ID NO: 1197 - protein, 119 aa, synthetic construct
ARREEIERTIRRMLEEVFNTGDADAAASYYDDDAQLHIWNGITFDTKEEIKKWIEEFWKRFPDSKLEIKHVEFTETHVTFHYTVTFNHDTGQIHVDFTSHFEFTNGKLVSERIHSNQRN

SEQ ID NO: 1198 - protein, 119 aa, synthetic construct
MDESEIREILREMYERLFNTGDADAFASYFHPDATFHFSEGITFTTLEELKEYLRQWYRKFKDVHVQIDSMHITETHVEVHVTIHVRNKDGKVTIHVRHHWRFSDGYIVELRAHFDRKN

SEQ ID NO: 1199 - protein, 117 aa, synthetic construct
SSEEEIKDIKKKFFEALDKGDLDKLHDLIHPGATFHFAWYQQTINDRSEFLEWVRSLLENADVQHEIKSIHVSGETVQVHVTFHVTHNGETRQYQATVHDRYKDGKLTESRFTTNQD

SEQ ID NO: 1200 - protein, 117 aa, synthetic construct
PSEEEVKEWVRRFYEAMNNGDLETLHQLLHPDATMHVSRVQITFHDRSEIIAFIKRTLEEFDLSIEIKSIHVGGDTVTVHYQVHTTHNGQTRTVDVTDHFHFKDGKLTEVRSHFNQT

SEQ ID NO: 1201 - protein, 122 aa, synthetic construct
SRKEEIEEAVRRFFERFIRAFNQNDADQVAEAFDDGATFHAPDGTQFTTKDEIKKWVEEVASQFDGIKVDDVEIHIHDDTVTVQWHITFHHGDETYHIDVTTHITFKDGKIKEFRIRFDNKE

SEQ ID NO: 1202 - protein, 122 aa, synthetic construct
SEQEEIKRILKDFYEKYFDALNKGDVDKIIEIIHPGVTYWHTSGQTFTTLEEIKEFIERLLSQIRGIEVKNMEIHVNKDKATVHITQTVNRGDRTYHVDSTHHWQFKDGKITEIREHNDQPT

SEQ ID NO: 1203 - protein, 122 aa, synthetic construct
SQNEEVEELVRQFFERFLRALNTKDADTFLSLFDDDWKFYHKSGRTFTTKDEFKEWFERFASNFDRVEIKDLEIHVNGDTATAHVTFTYTHGDRDFTNTVTEHHHFKDGKLKETRQQRDNQQ

SEQ ID NO: 1204 - protein, 114 aa, synthetic construct
PFSEEQVREWVKQYAEAVNTKDLDAIASLYDEDATFHHSNGRTFTTREEIKRWYEEFLRQDWQVQFDEIRIEGDTVQVHVTFTNSHDSKSWTATFHFHFRNGKLKEVRVQENQT

SEQ ID NO: 1205 - protein, 114 aa, synthetic construct
PLSQEEAKEIIKQYVEAFNTGDMDKLKSLYTDDATMHHSNGQTWTTKDEIKEWYERLFSQQWRVQLDRVEVHGDTVTVHLTFQNETDSKTVKYTFHIRFENGKIKEVQIHTNQT

SEQ ID NO: 1206 - protein, 120 aa, synthetic construct
PGEELIRRILRRFYEALDNKQDELKEILHPGVTYHDSSGRTFTDWREMADWLLEWFRSHFPDAKREIHSIEIRGDTATVHYTIHVNTDDRTITIHATDHYRFENQRLVEVRSHRDQDNNS

SEQ ID NO: 1207 - protein, 119 aa, synthetic construct
MDEEEIKQLLKRFYRALDEDWRKFASLVHPGATFHFSGLGITFTTHEEFIRWFTEWFRKRFRRTAHEIKEIHVDGDTVTVHVQVHVTHDDGRTQTYDVTEHHRFRNGKLVETRFHFHSK

SEQ ID NO: 1208 - protein, 122 aa, synthetic construct
DSEDQQKIKELVKRFFDAINRRDLEALRRILHPDAQYHNNNGQTLHTLDEIIEWFKQLMEEFPRAHIEIKSIHIDSSTKTATVHWTLHVTHPDGQNQTIHATTHFVFKDDKITEIHVHENGG

SEQ ID NO: 1209 - protein, 118 aa, synthetic construct
PSEEELKEWVKQFFRAWQDWEQAFEFIHPDTTIHEHRNGETYTFTNREEIVDFLQKFLSNHNIQIHIHRIEVHGDTVTVHWTLTVNHDSQQYHYSATTHFVFKDGRVTEVRMHIHQTD

SEQ ID NO: 1210 - protein, 120 aa, synthetic construct
QGKEEIEKIIRRLYEAFNRGNLDEFISLFHDDAQQHTNHPSGETYTFNSLEEIKEWWKRLFDNDTHVEVKSIEIRKDTVHSTVTVTINHNTQTKTMTVHETHHFKDGRITETHITFDDDG

SEQ ID NO: 1211 - protein, 120 aa, synthetic construct
PGEEEIRRWLRRYYEAFNRGDADELASLFDKDWTFHYQDHNGQEYTFTTLEEYKEWVERLQSQGAQMEVKSIHFDGDTVTSHVTIHITHGDTDHTFDVTEHHRFKDGKVTETHVHTTDRG

SEQ ID NO: 1212 - protein, 118 aa, synthetic construct
PLEEQIRQWVKRWVEALNNKDVDALASLYHPGATVHFSKGETLTTLEEIREWFERFAKTFKRMHIEIKDLHIHGNTVTVHMTVHLTQDGRDVTTNVTSTFHFKDGKLTEQHVHIDDEH

SEQ ID NO: 1213 - protein, 122 aa, synthetic construct
TDKEQQEKIKEVVERFYDALNKKDLDKVASLFHPHAQMHISDGYTAHSRDEIKKWFKEWMEKVKDFRIQIEEIRIEGDTVTVHVTVTTHHNGQQYHIRVTEHHRLDHNGKIVETHQHVDNSE

SEQ ID NO: 1214 - protein, 119 aa, synthetic construct
ASEEEIKEWVKRFFDAFDKKDMEALKELVDEGATFHFYQGKTFTDKDEFAKWVEEWLKRAKDTAHEIKSIEFRGDTVHVHWTVHVHHDGRTVTIHATTTFHFKDGRLTEVRFNLDNQPT

SEQ ID NO: 1215 - protein, 119 aa, synthetic construct
TSEEEIKEWLRRFYEAFNKGDLDDLHRLFHDGATMHISNGQTFTTREEIKDWFRRVLESAKDIKIEIKRIEFDGDTVTVHYTVTVNHDGKTVHVHATDHFRFKDGKITEVRSRFDQHDT

SEQ ID NO: 1216 - protein, 119 aa, synthetic construct
TSEEEIKDVKRRFIEAFNKGDLDALASLVADGATIHFAQGETITTKEQFKEYIDRVLKSVGRVHIELKEVRFDGDTATAHVTMHVHRPGKTVTVQATQHDRYKDGKLKESRTQFDQQDS

SEQ ID NO: 1217 - protein, 119 aa, synthetic construct
ASEEEIEELLRQFYEAFDKGDADRLFELLHPGATVWLWEGTQFNTREEFKEWVKEWFKQAKRVHREIKSIEFRGDTVTVHYTVHVHHDGKTVTTHATDHFRFKDGKIVEVRSHEDTHDT

SEQ ID NO: 1218 - protein, 119 aa, synthetic construct
PSEEEIRQWLKRFYEALDKGDMDKLRELIDDGATFHLHQGTTFKDKSEIEEWMERWFKTVGDVRREIERIEFHGDTVTVHYTLHVHHPGKTVTIHATDHFHFKDGKLTRMESHFDRHDT

SEQ ID NO: 1219 - protein, 120 aa, synthetic construct
PGEETIKELLERYYDALDRKDMDALEELVHPGATMHDSNGYTATDREEIKEFWRRLFETELKDSRHEIKEIHFDGDTVTVHVQAHFTHKTGQHFTFDVTHHWVFKDGKIAHLTYRVHQKD

SEQ ID NO: 1220 - protein, 120 aa, synthetic construct
PGEEHIREWKKRFVEALNQGDYEKLQELLAPDFTYHNSNGYTATTKEEFIRFYQELHKNGFTDVKMEIKEIHVDGDTVTVHVEVHVTHKTGKTYTFHVTTHDRYKDGKLVETHQQWHQQD

SEQ ID NO: 1221 - protein, 120 aa, synthetic construct
PGEEAIREWVKRFVEALNKKDMDTFKSLYHPGSQMHDSSGWTGNDVESIVEFFKRLFEETYTDVKIEIKEIRIEGDTVTVHMTMTVTHKDGRTVHIDATRHFRFKDGRLTEDRLHFDQKD

SEQ ID NO: 1222 - protein, 118 aa, synthetic construct
MSEEQIRDFVKKYLEAINNKDVDKIVSLYAPDATVHFSRGETLTSLEEIKEWYKRFLESVGDIHVELKEQRIDKDTVTSHVEIHVTHKDKTKTVDVTFHFHFRGQRLTEVRVQEDDRD

SEQ ID NO: 1223 - protein, 118 aa, synthetic construct
MSEEQIREIIHRWYKAWNDKDVDKLAELLHPDWTYENNNGERINSLEEFKKWVEEVMSSNGDFRVELKSIHIDKDTVTVHFEVHVNHKDKTKTMKTTDHHRFRGDRITETQVHVNDKD

SEQ ID NO: 1224 - protein, 118 aa, synthetic construct
MSEEQIKEWIKRYVEAFNKKDVDTLASLFSPDWQYHDSSGETIHSLEEFKEWVKQFMERAKDVRMEIKSIEITDDTATVHVTVTYNHDGKQIHADVTEHHHFRGDRITETRVTFNPQD

SEQ ID NO: 1225 - protein, 119 aa, synthetic construct
PSEEEIKEILERYFEAWDKGDWEKLLELLHPDWTQHVSNGQTFTNLEEFREYFERFLSRFERSRHEIKRIEFDGDTVTVHVQAHFRQGHQDYTTDVTEHHRFKDGKIVETRAHYDTKRT

SEQ ID NO: 1226 - protein, 121 aa, synthetic construct
SDREEIKEFKKQLIEALDRGDADAFAELVSDDVTFTFQQGITHTTKDEFAEWVRRWFSSGFDEVRREIKSMEIDGHTATVHVTVHANHRNGQTFTTHVTYHDRYQDGQLTETRASFDTKDS

SEQ ID NO: 1227 - protein, 120 aa, synthetic construct
PDERIEEIIRRWFEIFFKTGDADKAADLLHEGATVHFHQGITATTRDEIIKWFREFFSTLKDIKFQIEEIRVDGDTATVHWTATVNMNGKTVHYRGTTHFHFENGKIKEVHIHIHQEDQS

SEQ ID NO: 1228 - protein, 120 aa, synthetic construct
TSRKEAEDIARRYLEEFYKTGDWHAAADYYDDGATVHFAAYQITFKTLEEIIRFLRRLLSRMQEAHVEIKEVHIEDNHVTVHYQLHFTTDGQTQTYRFTSHIQFTNGKIVSERIHMDSGE

SEQ ID NO: 1229 - protein, 118 aa, synthetic construct
PDEEEIRKLINRYFEAFDKGDLDTLKSLFDEDWTQHHSSGRTFHSLDEFKDWVKKFLSNVETAHEWEIHIDPSGETVTVHVTVHLTHGNRTTTVHVTEHHHFRNGKIVETHIHEQPDS

SEQ ID NO: 1230 - protein, 118 aa, synthetic construct
PQEERIKEILRQLFEALDRGDADHFASLYAPDATIHFSQGITLTTREEIKEWVKRMNANSEIHREFEIHIDPSGSTVHVHFTVHRTHGDQTHTFHITSTFHFKDGKIKREQVHIQPDS

SEQ ID NO: 1231 - protein, 118 aa, synthetic construct
PDKEEIKEWIKRYFEAMDKGNVDELLSLFDDDWQYHNSNGETITSKEEFKEWVERWFSNVDTAHEVHIHVDDNGETVTVHVQVHQTHGDKTQTIDITEHHRFKDGKIVETRVHVQPKS

SEQ ID NO: 1232 - protein, 118 aa, synthetic construct
PAKEEIKEWKRRYFEAFDNGDIDAMAELVHPDAQFHYSNGITFNSLEELKEFLESTFKNTDSKHDFEVHIDDNNETVTVHVHVHLHHGDKTQTIDVTQHDRYKDGKLTESQIHEQSKS

SEQ ID NO: 1233 - protein, 118 aa, synthetic construct
PDKEHIRTILERLYEAFDRGDADAVASHLHPDARFEFSKGYTITNLEQFIEWVRRFISNTDVHREVHIHIDESGEHVTVHYTVHFNHGDRTQTVHATDHFRFRNGKITRVQSDVQDDS

SEQ ID NO: 1234 - protein, 118 aa, synthetic construct
PDEEEIKRLVEQFFEAFDKGDLDALASLYHPHATVHFAQYQVTYHSRDEFRKFFEEFWSNFTGSHHQIHEIRVHGDTVTVHVTTTFTHNGQQVDVRVTRHFTFKNGKLVRDQIQFDHT

SEQ ID NO: 1235 - protein, 118 aa, synthetic construct
PLEEQIKEWKKRFIEAVNKGDMEKLRQLVHPDAQFHFSASNTTFHNLEEFLKWVEEWLKKAKDARIEIKSIEVRGDTVTVHITVHTTHNGQKVTVRVTVHDRYRNGKLVESRFQFDGS

SEQ ID NO: 1236 - protein, 119 aa, synthetic construct
PSEEEIKDFVRRLFELLDRHKDADLMKKLYAPDATMHVSNGITFNSQDEIKKWFEEFQKKFGFQAQIDSMEVRGDTVTVHVTITMHKDGQTYHVKVTSHFRFDKEGKLKEEHIHEDQQD

SEQ ID NO: 1237 - protein, 122 aa, synthetic construct
PDEERLKDWYRRVYEEAINKRDPDALASYYAPDAEVHITHNGNTQTYSREEFKEWFERWLKRFPRVHVQIEEIRVDGDTVTFHVTMHFHHNGKQITVTVTYHVTLQGDKIKEEHVQFDNQRD

SEQ ID NO: 1238 - protein, 122 aa, synthetic construct
PDQEELKEWKKRVIEAIFNQRDADLFKRYVHPDATIHITQNGNTQRFDLDEFKEWFERFLSQFPRIHVQIDEIRVEGKHVTVHLTFHVHHNGKQVTIKQTQHDRYEGKRLKETHIHTDNDHP

SEQ ID NO: 1239 - protein, 117 aa, synthetic construct
PGEEDIKEWLKEFYRAIDEGDAETLKQLFHPGATVHFQDGETFHDLEEIVKFFQELFKRSRSRHEIESIEIRGDTVTVHYTAHFTHNGQNYTFHATDHFHFENKRLTEMESHSDQRD

SEQ ID NO: 1240 - protein, 117 aa, synthetic construct
PGEEKLRQLVRRYIEALNKNDLDKLEELYDDGATMHLSDGRTFTTKEEIKRWFEEMIKKSDARFEIKSIEVRGDTVTVHVTVHHTHNGKTITIHVTSTFHVRGDRIKEERVQFDQQD

SEQ ID NO: 1241 - protein, 117 aa, synthetic construct
PGEEALREWIRRFIEAFNNRDLDKLRELYDEGATLHISEGTTFTTLDEIIEWFERWMKNADFHIQIKEIRVDGDTVTVHVELHVTHNGKTVTIRVTSHLHFKDKRLKEERVQFDQED

SEQ ID NO: 1242 - protein, 117 aa, synthetic construct
PGEEKIKEWKKRFFEAFDKGDLDKLRELIHPGATFHFSEGTTFTTIDEFLKWVEEFFSNADFRHEIKEIRVDGDTVTVHVTVHVTHNGKTVTIQVTQHDRYRGDKLVESQIHFQQHD

SEQ ID NO: 1243 - protein, 117 aa, synthetic construct
PGEEKIKKFVERFFEAINKRDLDKLRELFHEGATMHISEGTTFTTRDEIIEWFERFIKNAEFKFDIESIEIRGDTVTVHWTVHVTHNGQTFTIHATTHFEIRGDKIARVEIHFDQQD

SEQ ID NO: 1244 - protein, 119 aa, synthetic construct
SSEEEIKQWLERFYRALLETNDPDAIASFFDDDATFHVHRGITYTSRDEIKKWFEEWLRSVSDIRIQIEHIEFRGNTVTVHYTVTVHQGDRTIHLTATDHFHFRNGRLKEMESNLNDQQ

SEQ ID NO: 1245 - protein, 118 aa, synthetic construct
PDEEEIKEWKKRFFEAMDHNDIDKLLSLFSDNVTIHFSQENITLHTREELKEWIERFLSRFKDVRHEIKSIHIHGNTVTVHVKVTFNTNGRTYHVDVTFHDHYRNGKLAESRVQFDQS

SEQ ID NO: 1246 - protein, 118 aa, synthetic construct
DSREEIKEWIKRWVEAFQKNDVDELLSLYADHVRVTFEAENQTLTTREEIKEWLERFIKRFKNIRVEIKRIEINGDEVTVHMTITVTHDGEQYHVDVTFHFRFKDGKLTEQRAHFSPQ

SEQ ID NO: 1247 - protein, 121 aa, synthetic construct
PSEEQQKQVEEFVNRYFEALNKKDVDTAASLFDDDATIHFADNITFTSKEQFRDWVEKFLRHSDIKVEYEIHIDSSTGTVTVHWTMHVHHSHSTHTMHATTHFHFRNGRLKEMRTQIDRED

SEQ ID NO: 1248 - protein, 121 aa, synthetic construct
ASEEQKEQVRQFVERYYEAIDKGDLDALDELLHPGWTYHNSNGRTFTSKEEFKEWVKRWISNMDTAHTMQVHVDSSHNRATVHGQVHVRHDNSTHTVDVTEHHQFKDGKVTHTRAHVDDRS

SEQ ID NO: 1249 - protein, 121 aa, synthetic construct
PSEEQQTQIKEIKRRLAEAFNRGDVDALYELYHPGATVHDSSGITFTSLDEIKEWLRQFFENLDVNVEFEVHIDSSTGTVTVHFTFHVTHSDRTKTVHATTHDRYKDGKLTESRTHWDEKS

SEQ ID NO: 1250 - protein, 121 aa, synthetic construct
PSEEQQSRIKEFLKRLYEAIDKGDLDALHELLHPGWQFHQSKGNTFTDREEFREYIKRIFDNSEVHREVHIHIDKDTGTVTVHVTAHYHHDNKTKEVHYTEHHEFRNGKLTSTQQHVDEKD

SEQ ID NO: 1251 - protein, 119 aa, synthetic construct
PSDEEKIRELIKQFYRAFAEGDWETLMRLLDENWTVHFARHQVTFHSKEEFREFVERVNRNSDIKFEVHIHIDKSTGTVEVHVTFHVTHGDETRTFHTTDTHHFRGDKITETHFNFNTT

SEQ ID NO: 1252 - protein, 119 aa, synthetic construct
PSDEEKIREWLRQFYEAFARGDLEALFELLSDDVQFHNSAEQVTFNTREEFKEWVKRFLDNSDVKMEVEIHIDKSRGTVTVHVTFHVTHGDETKTFHATHHWHFRDDKITRVEIHINET

SEQ ID NO: 1253 - protein, 119 aa, synthetic construct
PSDEEKIKELIKAFYEAFESGDLDRAKEIVHDDATFHITSENVTFHNPDEFKEWMKQVLSNSDIKMEIHIHVDRSTGTATVHYTMHVTHGDETRTRDATDHFRIRGDRITEVRSTWNQR

SEQ ID NO: 1254 - protein, 119 aa, synthetic construct
PHQREKIREWLERYYEAVARNDLDAVFELVSEDATFHYYWEQVTFHTREELKEWLKRLIDNSDTKMEVHIHIDDRNGTVTVHVTFHTTHGDETRTYHVTHHWHFRGDKLKEVHFRINQT

SEQ ID NO: 1255 - protein, 119 aa, synthetic construct
PSDEEKIREWVRRWAEAWQKGDIETLASLYTDDSRIHYAAYQITFTSREEWKEWVARHLSNVDVKLELHVHIDRSTGTVTVHITFHFRHGDQDKTVHVTVHFHFRGDRLKEQRVHINET

SEQ ID NO: 1256 - protein, 121 aa, synthetic construct
PDEEREQAKEWVKRFIETWVKTGDADAVEEFYDDDATMHLSNGQTFTNKDEIKEWFKRWIERFKDMQVEIKSIEVTDDTVTVHVTVHTTHNGEKYTFDMTSTFHFKDGKLKEERIQEDDKG

SEQ ID NO: 1257 - protein, 121 aa, synthetic construct
HDEDRERAIEWVQRMIEMLVKTGDADAAASLFHPDWTYHHSNGQTFTTLEEWKEWVKEWVKRVKRVHVEIKEIRATDDTVTVHVEVTFHHNGKQVHIDITEHHHFRNGKLTRTQTHEHSRG

SEQ ID NO: 1258 - protein, 121 aa, synthetic construct
PDEDREEAEEIVRRFYERWVKTGDYRVAQELMHPDATFHVWNGQTFTNLEEIAEWFKRWVERFKDFRFEIKSIEFTDKTVTFHGEVHFTHNGQQVTQKVTHHWTFRNGRIVEVRVRRHSTG

SEQ ID NO: 1259 - protein, 121 aa, synthetic construct
PSEDQRQIEEFVRRWIEIVDKTKDVDAAKSMLHPDWQFHDSNGQTFTDLDEFREWLERWLKRFKDFRVQIDEVRFDENTVTFHVTFTFTHNGEEYHFDVPEHHTFKDGRLVETQVHENDVG

SEQ ID NO: 1260 - protein, 121 aa, synthetic construct
TSEEEMERVLRRYYEAFNRGDLDALVELMTPDWTYHDETHGITITTLEEHRDWVRKFMERFKDYRFEIERIEFTGDKVTVHVTLHFTDKRTGQTYTVRVTDHHRFKDGKLKETRSRFNEVK

SEQ ID NO: 1261 - protein, 120 aa, synthetic construct
QDDHQAAEEIIRRYVEAYNKGDMEKIKSLYHPGSTYHQDSGQTFDHEEFLEMVEKRARNTHVQLDHIEIHVKDGTITVHATMTVTEKGSGRTYEFHSTFHMEKKGDTLYIVEEHLHSDST

SEQ ID NO: 1262 - protein, 124 aa, synthetic construct
PHDQQAAKEAVRRYLEALNRRDVEAVLRLFDDDWTYYDSSGQPYDKEEFKEWLEKYASLNFRIEITTTIHAEVKDGEVTVTIHVTVTWEQTGQTTHMTEHHHLRRDSTGWKIQRTQTHTDNTPT

SEQ ID NO: 1263 - protein, 124 aa, synthetic construct
PDDHEEIKELVERFLEAFDKGDADTLDKLLHDDWRYHHESGRTFDKEEFKEMVERFASVRVKREIETTIEIHVKDGHATVTVHVTVTFEDTNTTTHATETHHLRKTKDGWKFVRTQQHTDNQPT

SEQ ID NO: 1264 - protein, 122 aa, synthetic construct
PVDREQAAEVIERYYRAWQNKDIDALRSLLHPGATFYDSTGQRYDREEWLEMVKELLRHTDAQVQIHFDHFEQDGDEIRVTVTVHITYQATQQTYTATHHWRLRLFNGSVKILEVREHTRTS

SEQ ID NO: 1265 - protein, 122 aa, synthetic construct
MSEEHIRRLVKRYYEAFNRKDMDEIKSLLTDDWRYHNDKTKRTYDVEEFLDMVRKALSTDIEIRIESLEIEIRGDHATVHVRVHITHRQTGQTFTTRDTHHLERGDGSGKFKETRVQFDDGH

SEQ ID NO: 1266 - protein, 121 aa, synthetic construct
PGSEEEIKELLQRFYELLNNGDADALAELFHPDATFTFEGQNYDLEQFREWVERLFRANVDIQINGNIEIRFDGDEATATVQVTATNKQTGETYNFTHHWFFRQIGNQVFVIRLEIHSDQS

SEQ ID NO: 1267 - protein, 121 aa, synthetic construct
AGSKEEIKEIIKRLVEAFNKGDLEAIKSLYHPDATFEFDGQTYDLEQYIEMVEELHKNDAKLHINGNIEIRISGDEATVHVNFTITNSQTGETYTYRRTFRFRQQGNDLRIVRDEVHSDQS

SEQ ID NO: 1268 - protein, 121 aa, synthetic construct
AGSEEEVKDIVRRLIEAFNNGDLDALESLFHDDWTFHLNGQTYDKEQFKKMVEEMFRAGVKIQIEGNIEIEFDGDEVTVHVTFTVHDDRTGTTYTFHETHHLRLEGNRWRIIETRVTTDQG

SEQ ID NO: 1269 - protein, 124 aa, synthetic construct
DAEEAIKQWVRRYVEAWNKKDMDALESLFDDDWTFHDSDGQRFNREEWKERVKRIQDNTDSQMEVRNSIHIEIRGDTAHVTVYFTVTFHHSHSTHTFSVTEHHTFERENGDWKLKETRTRMHHT

SEQ ID NO: 1270 - protein, 124 aa, synthetic construct
DDQEAIKEWLKQFYEALDKGDMDALRELLHPDVQFHNQNGEQYDLDEFLKMVEEQNRNSNSKHDIINSIEVRINGDTITVHVTVQVHFHHSNRTQTTNFHETHHFEKKDGDFKLLRTETHSEQT

SEQ ID NO: 1271 - protein, 121 aa, synthetic construct
AGEEAVRETVRRFYEAWQNRDMDKLRELLDEDWKYHNTATQTTYDAEEWLEWVKQFASFNFRVHIHSMEVRQDGDHYTVTVHVTFTDDHTGRTVKVTDHHHFRRGDGRLKVVETRTHYHTS

SEQ ID NO: 1272 - protein, 118 aa, synthetic construct
SDQEEIRQWLRRFFEAMNNNDIDALVELFSPDWRFTHSSGTTDNSLEAFRKWVEEFMRRFDDVKIEVKEIEINGDTVHVHVQIHTTHGDKTQTFRVTETHHFRNGKLTETRVHVYDSG

SEQ ID NO: 1273 - protein, 118 aa, synthetic construct
ASEKQIRDAVREFYRAFNENDLDALMELIHPHAEVTFSAEGRTFTNREEYEEWFRRYMSRFDAKVEIKDMHVQDDGTVTVHVTITFTHNGQEFHVDVTDHYHFQDGKLTRVHSQFDQQ

SEQ ID NO: 1274 - protein, 118 aa, synthetic construct
TSEEEIREILKRYYESFNKKDVDKAASLLAPDWTQHNAAHQRTFTTRDEFREYFEKFAKRFDAHVEIKSIRIWSDGTATVHVTMTFTHNGQEYHVDVTEHHHFKDGKIKETRVNFDQR

SEQ ID NO: 1275 - protein, 118 aa, synthetic construct
TSEEEIKELLRRFYEAFDKGDWEKLHELLHPDWRLHVAEEQQTWTTREEFIEWVKEFFKRFNTAHRLEEIRVHDDGTVTVHVQMHRTHNGQTQTFDITEHHTFRNGKMVETRVSFQPT

SEQ ID NO: 1276 - protein, 118 aa, synthetic construct
TSREEIKQLVERFYEAFDRGDWKALAELLHPDWQMHIGRLNITLHDLEELIEFAKKFLANFDIQRHIESIHISDDGTVTVHVTVHMTHNGETRTFRTTDTHRFKDGKITETHADFDQT

SEQ ID NO: 1277 - protein, 118 aa, synthetic construct
DQEEEIKEWVKRFVEAFNRGDLDALAELFHDDWTFHHSNGQTFNSKEEFKKWVEELLSFDTKIETKSIEIRGDTAHVHVTMTTNHPGQQRHVQVTETHHFSDGKVTETRVHFGDTQTT

SEQ ID NO: 1278 - protein, 118 aa, synthetic construct
PSEEEIKEWLRRFFESLDNKDDEFAELLDDNWQYHDSSGNTGRDAKEMIEWLKKWFSQFDTAHHIDRIEIDKSRQTVTVHVTVHQTHKNGQTYTVHVTEHHHFRGKKLTETRVHRNQD

SEQ ID NO: 1279 - protein, 120 aa, synthetic construct
ASEEQIRQWVKRFVELMNNNDVDALMSIFHPDWTMHVQQWNGQQYDFTTREQLKEWFKRLASLPFRIEIKSLEIRGNTVEVHITIHVNHKSGQTHTHDVTETHHFKDGKLTETHQRWDQK

SEQ ID NO: 1280 - protein, 119 aa, synthetic construct
MSSEAIEELKRRYIQTAFNTGDADKFKSFFSDDSTMHVYRGITYTTLDEIKEWFERMVKEMQDYHVEIKSIEIRGDTVTVHLTTTVHRGDQTYQMTVTVHDVYKNGRLAHSEFRVDNKE

SEQ ID NO: 1281 - protein, 118 aa, synthetic construct
SSEENKEFVKRLIEIFFNTRDVKQFLDIVDEDWTFHDSDGSTLTTREEVKKWLEDFLEHFKDAKVKIDEIRAEGDTVTVHMTMHVRHGDQTHTYHITEHHRFEGKKVTETRVRTHPTS

SEQ ID NO: 1282 - protein, 119 aa, synthetic construct
ASEEEIRDWARRFYEALNNRDRETLHKLFSPDVQMHLADGRTFNSQDEITEWFNQWLEKAKDFRIEIEEIRVHGDTVTIHYTVEFHHKDSTVTIHFRDTFHFKNGKLTEVRSTWDERQQ

SEQ ID NO: 1283 - protein, 123 aa, synthetic construct
PSEEELKEFLKEFYERLWNTGDWRAMSEYMHDDVTVHYYRSSGETYTATTIEQVVKYFQEFASRFPDVKVTIDSIEVHGNHVTVHITIHATTDNQDFQFHVTHHWRFRNGKIVEVQAHWNQKE

SEQ ID NO: 1284 - protein, 120 aa, synthetic construct
MSEEEIREWLKRFYEAFNKRDLDKLLELVHPGARFHFSAHGETITDLEEFRKWFKRLLEELQDFRIQIDEIRVDGDTVTVHVTVHVTHEDGRTQTVHVTEHHHFVKDGKLVETRFHFNGS

SEQ ID NO: 1285 - protein, 120 aa, synthetic construct
PSQEQIEELVRRFFEAINHKDVDKIRELLDDDVRVHFSESNTTFTTKEEVIRWLEEFAKRFKDIRFEIKEIRVHGNTVTVHWTAHFTRDDGRTFTIHATTHFVFKKDGRIVEIRFHLNTG

SEQ ID NO: 1286 - protein, 120 aa, synthetic construct
ASQEEIKQWIERFFEAFNRRDVDKLISLLAPGWTFHNASNNQTWTNPEEFKEWVERWLKKAKRFRFQIDSIEIRGDTATVHVTVHVTRDDGRDFTYHITEHHHFNKDGKITETRQHINGG

SEQ ID NO: 1287 - protein, 118 aa, synthetic construct
PDEEIKRWVKEFIEAFQHKDLDALVSMLTPGWTYHDTDGTTYNDPEEFREWVERFMSNADFRVEVHEIRIDKRSQTVTIHLTMHVTHPGSHHTYTATEHHHFRDGRLVSTKEDRDENR

SEQ ID NO: 1288 - protein, 116 aa, synthetic construct
DQREEIKTWLDRFYESINQKDLDAIKRLYHPDATMHITKEQRTFTTQDEIKEWFERIFRTYPNMRVEIKSIEIRGDTVTVHVTITFTGDGKTFQVTDHYRFKDGKLIEQHSHFNDT

SEQ ID NO: 1289 - protein, 121 aa, synthetic construct
PEEEELKELAQRFIETVARAMNNGDADAIISLFDDDSTVHFSSEGRTFNSKEEIKEWFEKFASRFEIHIEIKRIEVHDGRVTVHWQLHYTHNGQPYTTNVTTHFVFKDGRFKHFRFQADHS

SEQ ID NO: 1290 - protein, 121 aa, synthetic construct
SSISEEQIREWLKRFYEAIDKRDRDTFRELIHDDAEFTVDGRTFTNADEFVEQFLRQWISNAQRTQRHIESIEIDDSTVHVHYTIHVTNGHERYQIHVTDTFHFRDGRLVRVQSHRDTKKT

SEQ ID NO: 1291 - protein, 114 aa, synthetic construct
PISEEQIKEWVKRWVEAFNKGDMDKLMSLYSEGSRFHDSRTGKTYDREEIERLIRQHLSQGIKVQLDSLEIRGDTVTVHVTFHQDQTGRTFHVTRHLQFKDGKLTEDRATWNET

SEQ ID NO: 1292 - protein, 123 aa, synthetic construct
TSEEQIKQLVERLIEALNRRDIDAFLSLVHPDWTDHQYHKNRSETYDKEEYKELLERMLSKAKDVKFEIKSIHIDGDTVTVHVEFHHTTTENGSEKHRTFRVTEHHRFRNGRLVETHSRFHDE

SEQ ID NO: 1293 - protein, 123 aa, synthetic construct
ASEEEIKDWLKKWYEAFNNKDLEKLAKMIHPDATFHLTQGNQTRTYDYEEMIEWIERFLKHFKRFHLEIKSIEIRGDTATVHVQLHLHEDKNGSTETHTFRVTHHWVFNNGKVTEVRAQEDPI

SEQ ID NO: 1294 - protein, 123 aa, synthetic construct
ASEEEAKEWVRRFIEAINRRDLDAIASLYADDVQFHFYHGDRTETYSKEEFREWFETMLRRWQEIHVEIKEIRIDGDTVTVHVQFHFTRTKDGSNETRTYRVTSHIHMRNGRVKEEHIHFHNT

SEQ ID NO: 1295 - protein, 122 aa, synthetic construct
PMSEEEIKDVKRRLIEALNNRDADKFASLFHPDATLHFSKGETLTTREEIKEWVERFLKQFPTATFQVDSIHIDQSTGRVEVHVTVTVHHDHKTVHIHVTFHDRYDPNGRLKETRANYDEGQ

SEQ ID NO: 1296 - protein, 122 aa, synthetic construct
PISREEIKEVIRRLVEAFNRKDVDELVELYAPDATVHFYQGETLNNLESIKEWLKQFFRTFKDVKVQIDSIHIDQSTHRVTVHITMHFHHDDRTKTVKVTRHFQFNSDGKLVEDRIHEDHGD

SEQ ID NO: 1297 - protein, 121 aa, synthetic construct
LSEEQEKAARELARRYVEAFNKDMDELERLYTDDSQMHVSEGITFDTKDEIKDWLTKLAKNARLEIKDMHVEYNPDGTVTVHVTVTVHHPNGTVTVHSTLHFEQRNGQFYLKREHIRWDSN

SEQ ID NO: 1298 - protein, 119 aa, synthetic construct
DAEEEIKEFLKRFYESLDNGDLEALARLIHDDAEMHVDGGRTFKTKDEIKKWFEEWLKKAKDSKHDIEEIRVDGDTATVHVTVHVNHKDGTVTIHVTEHHEFRNGKLVRTQAHEDPQPT

SEQ ID NO: 1299 - protein, 113 aa, synthetic construct
TSEEEIREAVQRYYEAWNHKDMDKLLSLIHDDWQNDTYNLTTKEEYKEFVKKFISRFPDFRIEIEEIRVSDGTVTVHVTFHFNHKDRTQTIRTTDHHHFKDGKITRTRQHRNN

SEQ ID NO: 1300 - protein, 113 aa, synthetic construct
TSEEEIKQWLERYYEAWNKKDLETLASLFHPDARIHSLGITTKEEFKEWVKRFFEQFKDVTVEIEEIRFSDGTVTVHYTVHQTTKDETRTTRYTDHYHFKDGRLTELRSQTDN

SEQ ID NO: 1301 - protein, 117 aa, synthetic construct
PSEEEIRDWFRRYFEAVNNGDIDALKSLYHPGATVHFSGGRTFKTQDEIREWYERFMRNFNAKIEFEVHVHDNGTATVHFTMHVTHPDGKNQTIDITVHVRFKDGKVTEVRFHEDQS

SEQ ID NO: 1302 - protein, 119 aa, synthetic construct
PSKESIKDWKRRYLEAIFRSGDADVAKSLVDDDATFHIAETQRTYDADEYREMWRQLMEKIQRVHVKIDRIEIDGDTVTVHVQIHVHHGDQTVTIDVTYHDKYRNGKLTSSQSHNDQKD

SEQ ID NO: 1303 - protein, 121 aa, synthetic construct
PQQEEIKEVLKRFYESFNRKDLDAIKRILHPDATIHLTHNTTTHTYDLDQYIEWVKRMLENVKRMKIDIHSIHVEGDRATVEYTVHQTHGDKDITMEAHDHVEMRNGKIVEMRSHIDERPT

SEQ ID NO: 1304 - protein, 121 aa, synthetic construct
DMEEQAKDTIRRLIEAFNHGDLEALKELYDDDATIHINKGDQTYTFSKEEFIEWVEEFLRRAQRARIQLDDLHIDGDTVTVHMTLHVTHGDKDRTIRITSHFRLKDGKIVEEHMHVDDTPQ

SEQ ID NO: 1305 - protein, 121 aa, synthetic construct
PDEEEIRRWVEEFYEAFNRRDVEALASYLDDDWTYHIQNGSQPQTYSKDDFKRWVEEFMRRAKDFHLEFKDLHIDGKTVHVHGTLTTRHGDQTFHMHTTDTHHFKDGKVKETRATYDEQPT

SEQ ID NO: 1306 - protein, 121 aa, synthetic construct
PDQEEIKEWLRQFYEALDKGDWEKVKRLLHPDATVHLTHGDQTETYSADEFIEWYKEWKKSASQVHREIHEIRIDGDTATVHYTVHVRFGDKTQTIHATDHFVFKDGKVTELRSHVDERPT

SEQ ID NO: 1307 - protein, 122 aa, synthetic construct
PSEEEIREWLRRFFEAINKKDLDAIASLFHDDATMHIYRGRTFTTKEEIKEWFERWLRTFKDIQIQIESIEINGDTVTVHWTAHVRDDEPRTITIRATTHVHFKDGKVTEMHIHLNQDDNNG

SEQ ID NO: 1308 - protein, 122 aa, synthetic construct
GGEEEFKEQIKQFFERYVEATLKGDLDTVKSLFHEDWQYHDNSNQITFNNREEFVKWVEEWQSNVSSTQFEIKSIEVRGDTVTVHVEVHFESNNQTFRVTEHHTFDKDGKLVSTEQTWHQHS

SEQ ID NO: 1309 - protein, 122 aa, synthetic construct
GGEEELREWVRQFFERLAEAINKGDTDAIRELYTPDSRYHNAATGRTATTLDEIVRFFQQMIKNLPQTTIEIKRLEVRGNTVHVHVEVHHSSTNRTFRVTSTFHFDHDGKLKEEEVHWHEHS

SEQ ID NO: 1310 - protein, 118 aa, synthetic construct
ASEEEIRQVVRRFFEAFNKKDIDTLVDLFHPGATIHFSKGRTFTTREEIREWFERVFRTFPDAQIEVKSIHVDGDTVTVHWEMHVHHNGKTVTVRATTTFHFKDGKLTEMHVQIHEHD

SEQ ID NO: 1311 - protein, 118 aa, synthetic construct
MSEEQIRQWLRRFYEALDKKDVDKVVSLFHPGATVHFSKGITFTDLEEIREWFEKWLKTYKDTAHHLESIHIDGDTVTVHYTVTFTTDGKQVHVRVTDHFHFKDGKLTRMESHEDERD

SEQ ID NO: 1312 - protein, 118 aa, synthetic construct
MSEEQIREVIRQFYEALNKGDLDAVMSYYDDGATMHVYRGITFNDKEEIKRWFEEFLKEFKDIQFHIESIHIHGDTVTVHVTVHMHRNGKTVTIRITQHFVFRNGKIVEDHIHVNEHD

SEQ ID NO: 1313 - protein, 116 aa, synthetic construct
LDQETAKELVRRFFKALNDGDLDALKELLHDDWTMHYNNQTFNSLDEFKEWVREWAQGWDVEIKSIEVHENPDGTVTVHVHLTTHNKKTGQTYHQTETHHFNKDGKIVETRAHMQD

SEQ ID NO: 1314 - protein, 116 aa, synthetic construct
SDQEEAKEIKKELIRALNEGDMDAFKELVHPDAQMHVDNQTFNSLEEIVEWFAQFISGTGIEVERIEVQENPDGTITVTVHFTFTDSRTGQTYRATSHDRYSQDGKIVETHFHRQS

SEQ ID NO: 1315 - protein, 120 aa, synthetic construct
PDEEQQEQIKEWVERWVRLFNTDVDKAASLYDKDSQVHINGQTFNDREEIIKWMRELKQTHIQVKSIEIRLHPDGTITVHVHLEVHYDHQTFRVTTTLHFRKEGDRWKLTHHHTTIDQVR

SEQ ID NO: 1316 - protein, 122 aa, synthetic construct
TDESEQREIVRQLIRRFYEALNKNWEEAAELFHEGVTMHADGRTFTTADEITEYIKQLFDQDIKIEIKSIEIRFHDDGSVTVTVHVELHNKDGTVSATHHWFFEQRNGQFRLVEMREHRQPQ

SEQ ID NO: 1317 - protein, 122 aa, synthetic construct
SDEEEIEEDARQVVRRMAEAFNTDMDELKRLYHPGATVHIDGQTFTNLEEIKDWATKLYSNDVKVQIDSIEVQVNPDGSVTVHVHFTVHTKDGTYKVTSTLFIELHNGKWYIVEERVRTQPT

SEQ ID NO: 1318 - protein, 122 aa, synthetic construct
TSEEEIKEAIKELVERFFEAFNKDWREAASLMHPGSTMHVDGQTFTTKDEITEWIRQLFSNDIKIEIKSIEIQINPDGSVTAHVHWTAHNSTGTVDATTTFFFTQHNGSFRLVEVRFRNQPT

SEQ ID NO: 1319 - protein, 119 aa, synthetic construct
TSEEEQREIIKEIVRREAEAFNNDRDAWYSLFHPDARFHYDNQTYDLDEVKEMLERAKDQKIQIDSMEVQVNDDGTATVEVHWTATRQGQTYHFTSTLRIEVGEGGWRIVEKHIHTIQS

SEQ ID NO: 1320 - protein, 119 aa, synthetic construct
PSEEQKEAIKELVHRFVEAVDKDPDAAFEFVHDDWTFHTDNQTFTDREEFREWVARLPEFRREIKSIEIRLNPDGTITVHVHVEVHYPGSTIKGTETHRFRQEGDEWKIVETHAHFQPT

SEQ ID NO: 1321 - protein, 124 aa, synthetic construct
SSEKEAEEEIKDFKQKLIEALNDGDMDKFESLLDKDQSQYHYNGQTFHTMEEIKEWFTQWLPGWKMQLDDLEVEIKPGGEATVHSTVTMHGPGKTITIHTTDRYRYEGDSWKLVETRTHTDEGE

SEQ ID NO: 1322 - protein, 124 aa, synthetic construct
TSRKEFEEEIRKLVKRFFEAFNKNDLDKLAELLDKDHATVHYNGRTFTTKDEIIDWFRNYAPGWNIEIKDLEVELKPGGEATVHVTWHATTNGQTYTGRTTIHVRKEGDTVKIIEVRIHIDPGS

SEQ ID NO: 1323 - protein, 121 aa, synthetic construct
PHPETESQVRDWIRRWVEIFNRGDSFDNLYDDDAQVHFNNRTFNDKEEIEEWFERLLKTFPSHIQIESLEIRQGDGEVTVHVTFTVTHENTNRDIRFHATFHFQKDDSSLRLVEQRVHTEG

SEQ ID NO: 1324 - protein, 121 aa, synthetic construct
THPSVEEAIRDIKRRMLEAMDNGDSVDNLFHPDAQMHVEDQTFHNKEEIEEWVKRMLESTSMHHQITGMEVRQGDGEVEVQVHVRVTTPETGTTYSFTFHDRYRREDDSWKLLETQIHTDG

SEQ ID NO: 1325 - protein, 121 aa, synthetic construct
PKPEDEKAARDLVRAMYEAFNRRDSMDGLMHDDAQMTVNTQDFHSKESVEEWFRRVARTFDSTVQIDSMEVHIGDGEVTVHVHVTVTRNETNRDFHFTHTWFIRRDDDSWRIVRVEFHRTD

SEQ ID NO: 1326 - protein, 118 aa, synthetic construct
PEDEEAAKETAKRYYTAMNTDIDAVRELFHPDFTMHIYNGQQFDTLEEVVEFLKQFIENTTIEIKSIEVRTNPDGTVTVTVHVTVHRKDGTIHVTHHWFIEKRDSRWQIVHLEERRQE

SEQ ID NO: 1327 - protein, 121 aa, synthetic construct
PSEEQIREMLRQFFRAINEGDLDTIKSLFDDDATVHFARFSVTVHTKDEIKKFFEEMQKRFDMKIEVKEIRIDGDTVTVHWEVHVTHNGQPYTFSATTTFFFVLKNGQLYISRMEIHINPT

SEQ ID NO: 1328 - protein, 121 aa, synthetic construct
PSEEQIKEMLRRFFEAINRKDLDAIAELIHPDATVHFASHNVTFKDLEEIKEYFEEMMRKFDFHIEVKEIEIRGDTVTVHWEVHTTHNGQQYTYSVTTHFFFRLQDGQLYITEVRVHMNPT

SEQ ID NO: 1329 - protein, 118 aa, synthetic construct
MGEEAVRDWIRRFYEAFNTDIDKLSQMYAPDAQFHVNGGQQFTTLEEITKWFRELASTTRIQIHHIEVHPNDDGTYTATVHATMHQDHRTVKVTQHFHFQVRGDDLQLIRDEVHFQPT

SEQ ID NO: 1330 - protein, 119 aa, synthetic construct
PEDEEQIRRFKERVIRAIQTDWEAVRELFHDDSTFELKKTQREYDLDEFTEWVRKWAENASVQLDSMEIHKHDDGTYTVHVTLTTHTRTKTFTIHATDFYRKIGNQWYIIRTTFDFTDD

SEQ ID NO: 1331 - protein, 123 aa, synthetic construct
PPPEDEKVLRDLVRQFVESMNKGGDRAKELYDDDATMHVDGQTFKTREEIAQWFKEWASTWEIHIREIRIQSNKDTGTYTVEVHVEVRTKDTTVNVTSTFFFQKHPNGQWRLKSEHIHRNQHD

SEQ ID NO: 1332 - protein, 128 aa, synthetic construct
SEREEQQKQIEEFLRRYYELLDRGDLEAIYELFHPDVRFTDARTGQTFDLDEYKEMLEEFMRRFRHSRHQIDSLRIEQKSETHATVHVTVTVQLEGNSHTQQFHDTYFFEFRGDQMYIVEVRSQTDDT

SEQ ID NO: 1333 - protein, 128 aa, synthetic construct
SEEEEAREQIKEWFRRYVEAFNKNDVDALASLYTPDARFQDSRTGRTFDKEEIREWYREILERFPDLQLQVESMRIQVDDETHLTAEVHVTIHLPGNETTVHVTYHVRFERRGDQVYITSMHARFHST

SEQ ID NO: 1334 - protein, 128 aa, synthetic construct
SENEEMERQIREFLKRYYEAWNKKDLDKIYELMHPDVTFVDARTGKEFNLEEFREMVERILKTFPELRFEIDSIRFQFDSKTSVTVEVHVTVHHSGNKKTVRVTHHWFFRFEGDELKVTELRERTHDT

SEQ ID NO: 1335 - protein, 128 aa, synthetic construct
SEEKELRERAREFLERFYTALQNKDLDAIAEMMSPDVTFQDSRTGKEYNKEQIREMIERWLRTFEDAQVEIKHMEAEIKDKNHITVRVTVQFTTKGNKQTYQFHHEWHFELRGDRLFVVRVQVHIHST

SEQ ID NO: 1336 - protein, 127 aa, synthetic construct
DLDPEQEKAVREFVKRFYELLNNGDADAVASLLHPDARFHHSSGRTFDREEFKEMVKELKKQGWEVQIESIEIRVESSTTVTVTVHVTVHNQSTGRTFHVTNHDRLVFEGDEVKLVEHRSHMEERST

SEQ ID NO: 1337 - protein, 127 aa, synthetic construct
DVDPTQQEAVKQLVERFFEAVNKGDLDALRELIHPDARFHHSSGQTYNLDEFLEMVEELFKQGWHIHIHSIEIRVVDKDTITVHVHWTAHNDSTGRQFDATTTFFVTQYGDEWKIVEVRIHIDTKTN

SEQ ID NO: 1338 - protein, 127 aa, synthetic construct
DADPEQEKQVKEIIERFFEAFNKGDADAVASLLHPDWTYHHSNGQTYDKEEFKEMVKELFKAGAEIRVHKIDFEVKDKDEIEVTVHYQMHNKSTGRTFDVTEHHRFVLTGDKWQIVETRVHIDEKTN

SEQ ID NO: 1339 - protein, 128 aa, synthetic construct
PDEMEEAVRKTDRKRLEAFNNRDADKFMEVVHPDATFYENGQPQQLSRDEIREWFEQWAKRAKDVHIQLHELHIQIGDDHHATATGHITFTFPGTNRHVQVTYTVHYQFQDGRLFLTEMREHRDSKQS

SEQ ID NO: 1340 - protein, 128 aa, synthetic construct
DDEQKEKIEEWIRRFYEALNNNDVDAVASLYTPGVKFYHNGQPRDIDRDEFREWVKEMLERLKDVKIEIKSIEIRVGDDTEITVTVHVQMHQPGTGITVDITQHFRFRFEDGRLRILEDREHSDSKQK

SEQ ID NO: 1341 - protein, 128 aa, synthetic construct
DDEMKEKAEEWKRRFVEAWNKNDLDAFDELFHDGAKIVVDGQEFPLSKEEIKEFIERLIRSAQDAQIHIKSLEIRIDDKDEATVHVHLEMHIRGTNQTVHITQTDRYRFEDGRIKLLESRSHRDHRNS

SEQ ID NO: 1342 - protein, 128 aa, synthetic construct
DDEAKEEAEKLVRRYYEAFNNNDWKAIKELLHPGATMHSDGQTYPRDQDELVEFWRRTVESLKDVHVQIDSIEIRVGDKDEVHVTVHVTFTQPGTNEHTHVTHHWRFVNTDGRWFIVSVREHRDERKS

SEQ ID NO: 1343 - protein, 128 aa, synthetic construct
PDEMQEAAKEADRRRIEAFNKGDLDKIASLIHPGATFYHNGQQFDIDRDEFKDWVREMRRRFQDVQIQIHEIRAQVGDDTEVTVTVHVTFTIPGTNIHIDVTYTVRYRRKDGRWFIIEVREHSDSKNS

SEQ ID NO: 1344 - protein, 126 aa, synthetic construct
DSEKEIQDTIKTIVKREIEAFNNGDVEAWASLYHPDATFTSGNRTENRSKDDIKRFVKQLLSQQWRVELESLEVRVDSKDTVTVHIHVTWKNERTGRTWKATQTIRLEKHNGQWYIVEKKSDRNQT

SEQ ID NO: 1345 - protein, 126 aa, synthetic construct
DSEKQIQEAIRTIVKREIEALNNGDADTWASLFHPGATFTSGNETQNRDQEDLKEWVERFFSQDWRIKLDSLEVRVDTEDEVTVHVHITFTQDRTKRTYHATFTIFVRKKDGEWKIVRKKSDRRQT

SEQ ID NO: 1346 - protein, 128 aa, synthetic construct
PSEEDERQLREVVRRYYEAINKGDMDTLRELLHPHATFVHDDQQFDISRDEYVEWVEKFVKNNDLKFDIDSIEVRKIDDTNFTVTVHVTVTERRTGRTYHVTDHYFFRRTEDGRWFIVRVESHTNQNN

SEQ ID NO: 1347 - protein, 128 aa, synthetic construct
PSKEDEEAIREIVRRLVEALNHGDMETLKELYDEHATIHHDDQTYPLSRDEIAEWIEKWLRNNDTRIHIKSIEIRVRSDKDYTVHVHVQVTNNKTGRTVKVTSTIHLKKRDDGRWYIQEEREHRNPET

SEQ ID NO: 1348 - protein, 128 aa, synthetic construct
PSPEDEKAIREVMKRFYDAINRNDWDELAKLFHPDARFHHDNQTFDLSRDEYTEWWRKQFESFDLEVRVESIEVRKISEKEFTVHVHVTVTDRSTGRTYRVDETHFLRKDDSGQWRIVETRSHRHQEN

SEQ ID NO: 1349 - protein, 120 aa, synthetic construct
NPYEEEARDLKRKYVEALNKNPDEFIKLVHPDATFHIEANNTTYKSLEEIRDYVEKQVKNSHVQVHSVRVEVKPNGEVTVEVHATVHHKDGTVDVTQHDRYRMQDGQLYLVETHERMQPR

SEQ ID NO: 1350 - protein, 126 aa, synthetic construct
MGEENLKEEVKKVLKQMYEAFNKGDWEALLRIMHPDATFHHSNGQTYNSLEEFREMVEELQKHDTQIEIKEIRIQIDSDHTVTVTVHATDTTRSDPTTVTVTHHWFMRFEGDTVKILEVREQFDRS

SEQ ID NO: 1351 - protein, 126 aa, synthetic construct
MGEEEAKRQIRETIKRFYDAFNNGDWEKLLRLLHPDATFHHSNGQTYNTKDEFRKWVEELLKNNVQIEIHSIEIQMHDETNYTVRVHATMKNSKDSRTIHVTHHWHFRFHGDQLRIVRVQVQFDQD

SEQ ID NO: 1352 - protein, 126 aa, synthetic construct
KGDEEVEKQIREIKRRLVEAFNKGDWEALARIFHDDFTFHDSNGQTITSKEEFREWFERWQSTNQQIEVKEIRIETKSKDEYTVEVHFKVTNSRSSTTVDVTAHDHYRVIGDNVYIIRSQVHFHQS

SEQ ID NO: 1353 - protein, 126 aa, synthetic construct
MGEEQLKEQIKEWKKRYIEAFNNKDWEKLLRLLHPDVTFHYSNGQTFNSLDEFREFFERLAKNDAQIEVHSIEIQVHDETEVTVHVRVTDRTGTDPTEVEVRSTDRYTFHGDELKLTETTAQFDQS

SEQ ID NO: 1354 - protein, 126 aa, synthetic construct
AGEEQIKEQVKEVLRQFYEAFNNKDVDKLLELLHPDFQYHIWNGQTLNSLEEFREYFEELAKNDVQLEIHEIRIEVKDETRVTVTVHVTDHTGQDPTTYHVTEHHFMVREGDQMYIAETRVQVDQT

SEQ ID NO: 1355 - protein, 119 aa, synthetic construct
PDEERIKEWLKRFYELFDRGDLDALASLLHPDWTFHHSSGTTLTTREEFKEWVKQFLERFENTAHQIDQIDIDGNTVTVHVTVHFHTDGRTVTIHVTDHHRFDKDGKLTETRSHFNQTD

SEQ ID NO: 1356 - protein, 119 aa, synthetic construct
PDEEEIKEILERFYEAFDRGDMDALFELLHPDATMHISNGETFHSAEEIKEWFERVLKTFGDVRHEIERIEFDGDTVTVHYTTHWHTKDSTTTVRATDHFVFDKDKKIKEVRSHWNPTG

SEQ ID NO: 1357 - protein, 118 aa, synthetic construct
PSEEEIREIDKQRLDAFDNGDLDALMSYFHPGATFHDSSGQTYHTLEEIKRWFKEFLDKFDVKRTEVRIHVDGHGTVTVHVTAHGTHNGKKIQFHYTYTVHYRNGKITEIHVHIDTQD

SEQ ID NO: 1358 - protein, 121 aa, synthetic construct
DSEEEIKEIIRRLIEAFDRGDLDALAELYDDGATYHDASGYTATDREDIKEFFKQFLEKFHEQFHHTEIRIHIDPNGETVTVHVTVQVHTKDQTYTYRVTSTVHVKDGKVVEERVHINQEN

SEQ ID NO: 1359 - protein, 121 aa, synthetic construct
PFEEEVKDLKTKFLEAINRGDVDALVELLTDDSTVHFTMYQITITSKEEFRKWFERFWKTYNAHFDISDVKIQIHGNEEATVHFTVHFRHGDRDITVTVTVHDRYVNGRFKRTRIHFNPHE

SEQ ID NO: 1360 - protein, 119 aa, synthetic construct
PTEERIKELLKRFYEALNKKDLDEIASLFHDDVRMHNQSNNITYNSKEEIREFIERLLSADFKIEIKEIRIDRDRQRVTVHVTMHRNHNGQTYTFDVTHHWQFKDGRIVEVRHHTRQRT

SEQ ID NO: 1361 - protein, 120 aa, synthetic construct
PDQEQIKEWLKRYVEAWNKGDLDALVELFHPGWTMHLSNGQTFHTLEEFREWVKELLDKFQDTQVEIDSIHIDQSKGRVTVHVTYHHNHPGQTRTAHVTEHHQFEGDRLVETHFHVDQKG

SEQ ID NO: 1362 - protein, 122 aa, synthetic construct
PEKEIEERIREWIKRWYKSWNDRDVDKIISLLHPGWTYHHSSGQTFTTLEQFREWVERLMKNADFRIEIKKIDISGGTVTVHVQMHWTHGDKTTTIDVTEHHHFRNGRLTETRAHYTSSPKD

SEQ ID NO: 1363 - protein, 122 aa, synthetic construct
PEEEEKQKIKEWLKQFYDALNNKDADAIKELVHPGATMHIADGITFTSRDEVKEYVKRIADNADIRLEIKEMHIQDGHVTVHVEVHEHHGDTTYTVRVTHHWRFKDGKLTEVREQTDRQPHS

SEQ ID NO: 1364 - protein, 122 aa, synthetic construct
PEPEEQEKIKEWVKRYVEALNNKDVDALASLYDDGATVHFANGTTFTTREQVREWYERMAKNSDMRVNLESLEVRNGHVTVHVTVTFHHGDKTTHIRITVHFRFENGRLKEVRFHWDSQPQS

SEQ ID NO: 1365 - protein, 122 aa, synthetic construct
PGEERIRELAKRFYTAINNNDLDTIARLLTPDVEVTFASEQRTFHNLEEVKEWFQRFIESNPRFRMQIEEIRVDGDTVTVRYTVHVNDKRTDSTYTTHAQDHFHVKDGKITRVTSNRDTHQT

SEQ ID NO: 1366 - protein, 122 aa, synthetic construct
PGEETIREWVKRYIEAWNKKDLKTLLDLVTDDWTLHLGSYQITFTTREEYKEWVERWMKTFPDFRIEIKSIEIRGDTVTVHVQIHGTNKDEPKTFTWDVTEHHHFKDGRITETHMDFDQKET

SEQ ID NO: 1367 - protein, 122 aa, synthetic construct
PGEEEIRKWVKRFVEAFNKRDADTLFELVTEDWTYHAAGQQITFTNAEEFKKWVEELLRTLSDFQMDITSIEVRGDTVTVHVTVHMRDDRTPKTVTTHITEHHHFRNGKITETRATWDTKDT

SEQ ID NO: 1368 - protein, 120 aa, synthetic construct
PSQEEIEEIDRQRIEAFNRRDADAVASYFAPGAEIHLSNGQTFTDLEEFKEWVERFLRRFKDIHIHIHEIHVNKDTVTVHMTVHFTHDNGQTYTMTVTYTIRYDKDGRITRMQVHVDEKR

SEQ ID NO: 1369 - protein, 120 aa, synthetic construct
PSEEQIKEWLRQWFEAFNNNDWETLASLYDDGATMTHYRGETFKDKEEIIEYIKRFLESMKRMRMEVKEIRFNDNTVTINVEVHVTHETGQDVTVHIQFHFRFDKDGKLVEQHTRTDQQN

SEQ ID NO: 1370 - protein, 120 aa, synthetic construct
PDESQIREWLRRFFEALDNRDLEELMRLFDDDWTMHIYNGQTFTDRDEVKKWFKEILDRMKDFRHQIESIHFTEETVTINVTVTVNHDNGQTFHIRVQEHHRFDKDGRLKETQFREDQQD

SEQ ID NO: 1371 - protein, 119 aa, synthetic construct
PPELEEQIKEFVRRFIEALNRNDLDAVAEILHDGWTMHINNQTFTTKEEVRKWVEEFLKKNKDLRIQIDSLEIRGNTVTVHVTVHFTHNGRTYDVSVTEHHRFKDGKLVETHVQRDQIH

SEQ ID NO: 1372 - protein, 119 aa, synthetic construct
MSEEEIRDWLQKFFEAIQNKDLDTFKRLITEGVTFHFSAEQKTFHDPEEVVEWFERWMRTFPDHRVEIHSIEIRGDTVTVHWTMHVTHNGQTYTIDVTTTFHFRDKKLVEVRFHFNERR

SEQ ID NO: 1373 - protein, 119 aa, synthetic construct
MSREQIERFVRKLVEAFNRKDRDAFEEVYSEGSTLTSDSTQQTFHNKDEIVEYFKRLADAFERFRVEIKEIRIHGDTVHVHLTFHFTHNGKDVTFDVTSTFHFRGNRLVEEKITVHERR

SEQ ID NO: 1374 - protein, 117 aa, synthetic construct
PTEERIRELLKRFYEAWNKKDLDKLVSLFHPGATIHSSEGITLTTQEELREYIERVMRRWKDTRIEIEEIRIDGDTATVHVTTHFHTNSQTKTVTATHHWVFQDNFVVELEERSNEH

SEQ ID NO: 1375 - protein, 117 aa, synthetic construct
PDQEDITEWLKRFFEAWNKKDLDTLVELFADGSTYHHADGITVTTKEEYKEFLRERFERAKDTQIEVKSIEIHGKTVTVHWTMHLTSNSQRHTVDVTTHFVFRGKRVTELRQHFNQK

SEQ ID NO: 1376 - protein, 117 aa, synthetic construct
DLREEIERFVRRLFEAINKKDLDALKEIFHPGWTFHLSQGTTFTTLDEFREWVREVQERFKDTQIQIHEIRIDGYTVTIHVTVHFHSNSQTKEVTVTEHHHFKDHKLTETHQHHNEK

SEQ ID NO: 1377 - protein, 118 aa, synthetic construct
ASEEEIKQWVERWAEAFNKKDLDELARLFHPDSQYHDQNGETLTTKEEYREWYERLMRSLKNFHIEVKSVEIHGDTATVHWQMTTHRPDGQQYHYTATTHFQFKDGRLTEVRQHTDGT

SEQ ID NO: 1378 - protein, 118 aa, synthetic construct
SSKDEIKEAVERFYDAFNKGDVDLLASLVHPGATFHDSSGETLHSKEEFREWVKRFLDEMEDTKFEIKSIEIRGQTVTVHFRLTVTHSNGETRDGTYTDHYHFKDGKLVEIRSHEHGE

SEQ ID NO: 1379 - protein, 118 aa, synthetic construct
PSEEEIKEFANRFYEAINQGDLDAIMRLFHPGATFTVNEGTTYHSKEEIRKWFKEFFERVKQIHIQIHSIEIRGDTATVHGTVTVHHEDGRQQDFTVTHHWHFKDGKLVRVEERRHGS

SEQ ID NO: 1380 - protein, 118 aa, synthetic construct
PSKDEIKEWLERFYEAIDKNDWEALERIIWDGWTFTDSSGQTWTTRDEFREWFETMVERFKDMRHQIDSIEIRGDTVTVHVTATFHHESGETRTQHVTDTHHFKDGRITRTRSHRHSS

SEQ ID NO: 1381 - protein, 118 aa, synthetic construct
PSKDEIKEWLERFYEAFNQKDLDALDSLVDDGWTFTHSSGETLTTREEFRKWVEQFLREVQDIHIQIESIEIRGDTVTVHVTVTVHHKDGRQQHMRVTETHHFKDGRITETRQHIHGS

SEQ ID NO: 1382 - protein, 118 aa, synthetic construct
PSEEEIKDIKRRFAEALDNNDVDTAASLFHDDATVHFSKGETLTTKDEIREWIERWASRFKDTAHEIKEIRIDGDTVTVHVEVHFHHKDETKTVRVTVHDKYKDGKITRSQFNYDEGG

SEQ ID NO: 1383 - protein, 118 aa, synthetic construct
PSEEEIRDFIRRLVELLDSGDADAVASLYDDDSRVHFSEGETLTSREEIKEWVERYFKSLGNVHREIKRIEFDGDTVTVHVTVHIHHNGKTVTVHVTRTFHFKDGKLKEDHVHIDNGG

SEQ ID NO: 1384 - protein, 117 aa, synthetic construct
SDEEEVKEIKRRLVEAMDKGDWETLARLFHDDAQFHFEATGTTFHDKEEFIRWFQQFVSNAEIHRQVHIHFDGDTVTVHLHVTVTHGDQTHHVTATVHDRYKDGRLTESRFTFDPRE

SEQ ID NO: 1385 - protein, 120 aa, synthetic construct
SVSEEELREWLKRFYEAFQKGDIDALKELIHDDWTYHDSSQGITFTTKDEFREWIKELFEKFDFQIDSMEIHVHGNTVTVHVTVTVHTKDKTKTIHVTDTHRFKDGKLTETHSHVDEKET

SEQ ID NO: 1386 - protein, 120 aa, synthetic construct
SISEEEVKEFIRRFLEAFEKGDLDALAELFTDDWTVHFEYSGITFHTLEEFKKWVKEVLEKWEYRVDSMKIDVHGDHVTVHVQVTRHHPGETQEFTYTEHHRFKDGKITETRFRRHQHDT

SEQ ID NO: 1387 - protein, 120 aa, synthetic construct
QISEEEVKEWVRRFAEAFQRGDVDALISLYTDDATIHFESEGRTFTTKEELKEWLTQLFRRAEFHVDSIEIHVDGNTATVHVTITATQPGRTYTYHVTSHFRFKDGKLKSERVTIETRGS

SEQ ID NO: 1388 - protein, 120 aa, synthetic construct
QISEEEAKEVVRHLIEAFQNGDMDALMSIYTDDATFHMASEGRTYKNKEEIKDWFRRLRESADYQFDEVEIHVDGNTVTVHMTVTVHHKDKTVQQHYTSHFRFENGKLKEEHVHVDTRET

SEQ ID NO: 1389 - protein, 120 aa, synthetic construct
SISEEEIREFLKRFFEAFQRGDMDALKRLMHDDATVHFSSEGRTYHTLDEIKDWFRRVWESAEYHFDEIEIHVHGDTVTVHVHVTVHHPGETDHITYTVHDHYKDGKLTRRQVHIERRRT

SEQ ID NO: 1390 - protein, 120 aa, synthetic construct
PISEEEVKEWIKRYAEAFQNKDLDAIMSLYTDDATVHFASTGTTFETKEEIRDFYRKVLENADYQFDEIEIHIHGSRVTVHVHVTVHHPGKTVKITITMHFQFKDGKLKEVQIHVETKQT

SEQ ID NO: 1391 - protein, 120 aa, synthetic construct
PEQQEKIKEFLKRFYEAFERGDLDAMFEMLHDDWRFHYEYENITFHNREEFKEWAERFMKRFEFQVHMTIHVDTDNTVTVHVTVHTTSPDGQPYTFHTTDHHRFRGDRLIETRVHVRQET

SEQ ID NO: 1392 - protein, 120 aa, synthetic construct
PEDREKIKEIVKREVEAFQRRDLDTWAELVHDDARITFQYENRTFTNKEEYKEWLRRFMETWEFRVEVTIHITSSHTVHVHLTFHVRHPSGQDHTFHVTVTIHFRGDKITEKHFQWHQED

SEQ ID NO: 1393 - protein, 120 aa, synthetic construct
PEDRERIKEWLERFFRAFANGDLDALKELLTPDWQFHYEPQNITAHTLEEFKEWVERFIKQFDMRVEIHIHVSDSDRVTVHVTLHVTHPTGQPQTYHITEHHRFKDDKITETRVHVDQQE

SEQ ID NO: 1394 - protein, 120 aa, synthetic construct
PEQREKAKQTLERFFEAFQRGDMEKLERLLHDDWTFHWEQQNITFTTKEEYKEWVRQLLSHFDVQFEIEIHISDSNTATVHVTIHWTHRSGQKRTIHVTEHHHLRGDKITETRAHIEQKE

SEQ ID NO: 1395 - protein, 120 aa, synthetic construct
MSEEELREWLRRFYEALDRGDADALASLYDEGVTIHISEENRTFKNKDEFREWFRHWFSNTDTAHEVHIEIKDDTTVTVHVHVTLHHKDGKTVHITVTQHFHFRGKKITEDRAHIDTKET

SEQ ID NO: 1396 - protein, 120 aa, synthetic construct
TSEEQIREFLKRAYEALNRKDLDAFAELFTPGWRYYHAEENRTFTDKSEVREWIRQYLEKTDAKIEVHIHVDDDTRVTVRVTVHFTTKDGKKQTVHTRDHHHFEGDRITETRAHYDTKDT

SEQ ID NO: 1397 - protein, 119 aa, synthetic construct
AHEEKIREWLKRYIEAVNRKDLDAVISLFHEGWQMHHANGITFHTRDEVRKWFEEFLRRFPRVRVEIKSIEVTTDTVTIHVTVTVHHDGQTIHIDVTEHHTFKGDRITETRIHIDEKPT

SEQ ID NO: 1398 - protein, 117 aa, synthetic construct
PDEEEIKRILKAFYDAIDNGDMEKIKELMHPDAQLHNSSQGITWHDLEEIAEWFARFASLRNTAHEIKRIEFDQDHVTVHYTTTVNKNDQTYHFNVTDHFRFKDGKITEVRSHIQGE

SEQ ID NO: 1399 - protein, 116 aa, synthetic construct
PSEEEIKEIKKRLLRSVDDNPNDMDWFKKVFDKDHVTMHSDNTTMTTADEIVEWFQRQFATNNSKRELKSLEIRGDTVTVHVEVHETRTGRTFTVTYHDQYKDGKIVSTTAHRDST

SEQ ID NO: 1400 - protein, 116 aa, synthetic construct
SSEEEIRQWLKRFYEAFDRGDADALKEIVHDGWTLRSYNITDKEEFKEWVERWFSQFPQMHRQLDRLEVEGGTVTAHFTVHFTHNGRTFTMHTTDHHHFKDGKLTSTQQHTDEQPT

SEQ ID NO: 1401 - protein, 120 aa, synthetic construct
PSEEEIKEIDKRRLEALDRGDMETFKELVHPHAQMHVSEGKTFDTRDEIAEWFERFWKSFKDMRRHIEEIRVENGTVEVHVTVHFTHDNKTTTVHITYHVRYDKDGKILSMQFHRNQTSD

SEQ ID NO: 1402 - protein, 117 aa, synthetic construct
PSEEIARQIKRRFIEALDRGDADAIAELFHPGATFHDSSGRTFTTKEEIKEFVERWQSQFQDSRHQIDNVHFDKDHVTWHVTQHFTHNGQTFTVHVTVHDRYKDNRLVETHFHHNHS

SEQ ID NO: 1403 - protein, 118 aa, synthetic construct
SSKEEIKEWLKRFYELINRHDLDKIAEFLDEGWTMHIESEQYTATNKEQVRKWFEEFMKKVERIRIEIEEIRIDDNTVTVHVTMHVTHNGQTQTYHVTEHHHFKDGKITETRQRVHTG

SEQ ID NO: 1404 - protein, 118 aa, synthetic construct
MSEEQIKEWLRRMYEAIDNNDLEALMRLFHDGWTMHIESQQVTFKDKSEVKDWFRRYLESVKDTAHQIDSIHISDDTVEVHVTTHENHNGQTYTYRVTETHHIKNGQFKETRQTVDTG

SEQ ID NO: 1405 - protein, 118 aa, synthetic construct
MSEEEIKDWVRKWAEALDNNDLDTLASLYDDGATVHFQSEQRTFNNKEEIKEWVERWLKTVKDSQHDIDDLHIDKDTVHVHFTVHLTHNGQDHTYHVTSTFHFKDGRLKEERIQVHTG

SEQ ID NO: 1406 - protein, 118 aa, synthetic construct
MSKEEIKEWIKRYFEAINRKDADKIVSLFHPGWTFTNESQQITFEDQSEFKEWVERWLKSVKDIHVEIDRIEIDKDTVTVHFTVHVTRNGQDHTFHATEHHHFRNGQLKETQLQIDTG

SEQ ID NO: 1407 - protein, 126 aa, synthetic construct
DREEAEKAIEEWVRRFLTALNNKDLDKVLSLLDDDWTYHDSSGNTYTTREEVEEWVREFMSQNWQITYQDLHIQQHGTHTYTVTVHVQYHDKRTGRTFQVTEHHHIERQPDGSWRVVETRVHTDNE

SEQ ID NO: 1408 - protein, 117 aa, synthetic construct
DELEEFKRRAFKAIIDTNDWDKMAKYYHEGATITVNNETRDLGREQLVEWFRRFLSRVGEMHWQIDRVEVDQDHVTVHLTVTFTHDGRRVTVRVTEHDRYKDGKLTSSNQHRDQDDS

SEQ ID NO: 1409 - protein, 117 aa, synthetic construct
DELRELKKKFYEYIVNTRDLDAVKEYFHPGATITEGNRTETKDQDQIVEWFERWWSRVGQAHHEIKSIHVSDNHVTVHVEVHTTHNGKKITFRVTQHDRYENGKLVEMHVHVDQDDT

SEQ ID NO: 1410 - protein, 120 aa, synthetic construct
PGDESKIKDIVRKMYEEAFNSNDWKAFEEAVTPDSTMTVQNGQTFTTLEEIVRWFQEFIKTFKDIRVEVDSIEVRGNTVTIHVTVHAHHDNRTITFHATHHWHIENDRFTEVHSRWNQKD

SEQ ID NO: 1411 - protein, 120 aa, synthetic construct
SSEEEIRQLVKRFYESINNNDVDAAASLFHPDATMHISQTGQTFTTKEEIRKWFEEFLRSVSDIKVEIKSMEVRGQTVTVHVTITVNHGDRTVHMHATHHWTVKDGKITEMREHVDRQPD

SEQ ID NO: 1412 - protein, 120 aa, synthetic construct
ASEEEIREIIRRLLEAMDKGDMDALRELYHPDARFEASETGQQFDTLDEIMEWFEKWHKSVGEVHREIKSLEIRGDTATVHVTVHTTHGDKTYTTDFTSHFRFKDGKITEEQLHVRTQPT

SEQ ID NO: 1413 - protein, 120 aa, synthetic construct
PSEEEIEEILRRLYEAFDKGDWEKIASYMHPDAQMHISQTGTTFDTLEEIIEFVERFFKEAGDVKRQIHSIEIRGNTATVHSTVTHNRGDQTFHMRATHHWHFKDGRITSVKEDVDTQPS

SEQ ID NO: 1414 - protein, 119 aa, synthetic construct
PSEEELKEWVKRHLERIFNSGDWNAAKAMFHPGVTVHVYNGQTFKNPEEIAEFIRRFIESFKDVRLEIERIEVEKDTVHVHWTAEFHTDTETVHIHGTTTFHFENGRLKEVHIHLRQTN

SEQ ID NO: 1415 - protein, 122 aa, synthetic construct
PEFEEEVEEWVRRMFQAFFRTGDWRALEEAFHPDAKVTWARGEQTYDQEEFIRWFTKMMSRFTNAHFEIKEIRVDGNHVTIHWTVTFHSPTQTFTMHGTTHFRFKDGKLTHVRFEIHQDDGS

SEQ ID NO: 1416 - protein, 118 aa, synthetic construct
PISEEQIKEIVKRFYDAWNNNDVDKLVSLFHPGATFHFWNGITATDLEEFKEYVERFLSNFNTQAQIHNMEIRGDTVHVTYTMHRTHNGKTVTLEATDTFHFKDGKIAEYKSDVDDKD

SEQ ID NO: 1417 - protein, 118 aa, synthetic construct
PISEEEVKEFKKRFIEALNKNDLDELKELFHPGSTFHFADGETVTTLDEFKEWVERMFKNFNFEFHVKEIRVHGRHVTVHVEVHFTHNGQTFTIHVTVHDTYKDGKITHSQFDIDQTD

SEQ ID NO: 1418 - protein, 118 aa, synthetic construct
PVSEEQIKEVLKRFYDAINNGDIDAIVELIHPGATLHFSKGITLTTLEEIRKFFERTQKRFNTKIEIHSIEIRGDTVTVHVTMHATHNGQPYTYRVTHHWRLQNGKVAEVHHQENDTS

SEQ ID NO: 1419 - protein, 120 aa, synthetic construct
PEPEEIAEELVRTIEEAMNKGDVDKMLSLYAPDATVHFSNGQTLTTREEIKRWFEEFFSKFKDVQVEVKSVEVNGDTVTIHFTVHTNHENKTTTFHITSHFHFKDGKLKEERVHIDQEET

SEQ ID NO: 1420 - protein, 120 aa, synthetic construct
PEAEQAVRDFVRTFLDAFNRGDVDAIASMYHPDATMHLSNGQTFTNLEEIKEWFRRWFSNAKDVHIELKSVEINGDKVTFHFEIHVNHEDRTVTFDVTSHVEFKDGKIVSEQIHTDQKQS

SEQ ID NO: 1421 - protein, 120 aa, synthetic construct
PEDQERIEEILRRFYELFDRGDMDRAVDEAFDDGATMHLAEGQTFTTKDEIKEWFRRLWSTIKRLHRQIERIEIRGDTVTIHVTVTVHRDNEQIHMRATHHWTFKDGRITEVHSHTDQHN

SEQ ID NO: 1422 - protein, 121 aa, synthetic construct
PKERQDRITEIDRQRAEAWNRKDLDAVMSYVHPDATFHFAETNTTYDREEFREWVERVLKTFPDMHVQIEEIEVRGEHVTVHSTVHVNTPTKTRTIRVTYTVRYKDNRLQEMHVHTDTEDQ

SEQ ID NO: 1423 - protein, 121 aa, synthetic construct
PEEDERRIKDLKKKEVEAFQNKDLDKVMSLFHPDATFHFADRGETYDYEEFREWVERVLKTFKSIQVEIKEIRIHKDEATVHLQFHVHTDTKTHTVDVTVHDRYEGDKLTETQFHTDQKHS

SEQ ID NO: 1424 - protein, 120 aa, synthetic construct
TSEEEIREIKRQYIERFDKTGDARVFEDMFHPDAQYHNDSEKRTFDTMEEIKRWFNESWSNHDSQRHIHEVHFENGTATWHVTVHRTDKSTGQNYTIEFTYHDEYKDGKIVRTQEHSRQT

SEQ ID NO: 1425 - protein, 118 aa, synthetic construct
MSEEEIRDLDRRRIEAFNKNDVDKVASHYHDDATVHYNEGITITNKEQLKEFVRKFIESAKRVKLDIDGMEIRGDTVTAHGTMHVTHGNKDTTIHFTYTITYRDNRIQEEHVHRNQQD

SEQ ID NO: 1426 - protein, 118 aa, synthetic construct
MSEEQIKEFIKRLLEALDRHDVDKFVSMFHPDAEVHFSSGITFTNREEFEEWVRRWMSQFKDSQHDVHSIEVRGDTATVHWTQHANHGDKTTTFHGTTHFVFRGNKLVSMHVHIDQQD

SEQ ID NO: 1427 - protein, 118 aa, synthetic construct
PDRERIADFVRRMLEEFFKKRDVDAAMSYYDDDATLHIYQGKTFTTKDEIKEWLERFLKTYKDAHVEIKSIHVSDGTVTVHIELHLNHKDQTRTYTITSTFRFRNDRIVEERVHEHQQ

SEQ ID NO: 1428 - protein, 123 aa, synthetic construct
PVSEEEEKRIRDILRRLIEAFNKGDLDALASLYHDDWTFHLSEGYTAHSKDEFKKWVEEWLKKAQQIHLEIKSIEIRGDTVTMHVRITVTHNGKQVDMDVTEHHTFRNGRLTETRMHTDTKDK

SEQ ID NO: 1429 - protein, 119 aa, synthetic construct
MDEEQIKEIIERFFKAMDTGDLDTIRELFHPDARVHFEAYQITLTTLDEFIDFIRRWLEQFPDVRHEIESIHIDGDEVTVHWTAHFNHNGETQTFRYTTHIRFKDGKIVEMQIHENDER

SEQ ID NO: 1430 - protein, 119 aa, synthetic construct
TDESQIRELVQQLFEAMNNRDRDTFKSLYHPDATMHIEEEQITFTTREEIAEWFTRFLKRFPNARFEIESMEIRGDTVTVHVTVHFTHNGQQYTYRYTRHFRFKDGKLTRDQMHVDNQE

SEQ ID NO: 1431 - protein, 119 aa, synthetic construct
TDESQIRELKKRFIEAFNNKDWDKLRKLVHPDATFHFEKEGVTLTTLDEFVEWFKRFLKRFPDVQIEIKSVHIDGDTVTVHMTMTFTHNGETRHVNVTVHDRYKDGKLVESRFHFDDTY

SEQ ID NO: 1432 - protein, 121 aa, synthetic construct
TDQEQEEHIREVLRQFYEALDKGDADKVASLIHPDATIHIARDQITFTNKDELKEWAERWFSQFPDIQRHIESIEFRGDTVTVHFTVHVTHNGKTYTVRVTDHYHFRNGKLIRVESHVQPE

SEQ ID NO: 1433 - protein, 121 aa, synthetic construct
ADKEQQEEIKDILRKLYEALDRGDMDKFKSFFHPDATYHNIETQIKFDDLDEMKEFLARWLSQFPDTAHEIKSIHISGDTVTVHVQTHLTHNGKTYTYDVTEHHRFKDGKIVETHTQFDEP

SEQ ID NO: 1434 - protein, 122 aa, synthetic construct
DTDRQEHIKELKKRFLEAFDRGDAEALAQMFHDDATITFASVQITFQDKEEFKEFVKRFASTFKGAQREIKSIEIRGDTVTVHVTLHVTHDGKTVTIQQTTHDRYKDGKLTETHTTTDSKDT

SEQ ID NO: 1435 - protein, 122 aa, synthetic construct
DTEIREQIKQFLRRLFEAFDKGDWEKLARLFHDDWQFTSAAEGKTAHTKEEFIRWFREWVSRVPGAQREIKEIRISGHTVTVHVTQHRHHPGSTVTTHVTEHHRFKDGKLTETRQHMSTEQQ

SEQ ID NO: 1436 - protein, 122 aa, synthetic construct
DTELKEQIKEILQRLFEALDKGDLDAVASFYSDDSTVHVSYEQITFKNKDELKKWLEEFKKHFPGSQREMESIEINGDTVTVHVTVHHTHKDSTVTTHQTRHLRFKDGQLKEDHIQTHEHQQ

SEQ ID NO: 1437 - protein, 118 aa, synthetic construct
PQEEQIRQWLRRFFEAMDKGDWQTLHDLFHPGATIHFYNGVTLTTREEIARFFKKMTESFSDVKRQIESIEIRGDEVTVHWTMHTTQGDETYTYHATTHFRFKDGKVVEVHVHINQQD

SEQ ID NO: 1438 - protein, 118 aa, synthetic construct
MSREEIKELIERFYAAFNTNDPDAVREALHPGAEVHSSKGITFTDLEEIKEWVERWAKTFQNTRIQIDRIEFHGDTVTVHVTIHTNHKDHTVTTHATHHWVFRNGRITHLQEHTDDQQ

SEQ ID NO: 1439 - protein, 121 aa, synthetic construct
PEKDERTIEELKRRFIEAVAKGDDPDKLKKLMHPDAQFHDSNGQTFNSLDEIAEWFAEVQSKFKDMQVEIKRIQFDGDTVTVHVTVHATHNGRTVTYTVTSHDTYKDNRIVETHVHIDSND

SEQ ID NO: 1440 - protein, 121 aa, synthetic construct
QDEEEETIKELLERFYRAIANGQSWEWIEEFLHPDFTMHLSNGQTFNDREEVARWFQEVMKRTKDTRIEIKSIEFKGDTVTVHVTVHTTHNNQKRTITVTHHWTFKDGKIVRLEERRDSND

SEQ ID NO: 1441 - protein, 121 aa, synthetic construct
SDEEEEKIKELIHRFVELYAKGDDPSAFKSLLSDDWTFHDSSGRTFHSKDEFVEWVERALSQFKDSKIDIDSIEFKGDTVTVHVTQHATTNNQTYTFTITEHHRFTKDQIVETRQHRDSND

SEQ ID NO: 1442 - protein, 121 aa, synthetic construct
DREEELKEALRRYYEALDRGDMDAAASLFDKDWTMHQTHSDGSQQDFTTKDEFKEYFREQFEKSDIKRGEVRIHVNDDGTVTVQIEVHVTHDNSTRTRDTHDTHVVKDGKFKETHIHWDYG

SEQ ID NO: 1443 - protein, 121 aa, synthetic construct
PDEEIIKELLKRFYEALDKGDWKALKDLLDKDWQYHQTHSDGSSRTFTTLDEFVEWYKEQVKNSEVHRGDIEIRINPDGTVTVESEVHVHHKDGTKTVNTHDTHVFKDGKIVETHVHWDDG

SEQ ID NO: 1444 - protein, 118 aa, synthetic construct
PDESEIRETIKREAEAFNKGDVDAWASLFHPDATMHIYNGQTFTNLEEIKEWFERLIKRFKDAKVEVKSIRFEGDTVTVHVTFHFHHDNETKTFHVTQHITFKDGKITEKRQQMDEER

SEQ ID NO: 1445 - protein, 118 aa, synthetic construct
TDEEEIRQWLRRFYEALNNKDWEKVKSLYHPHATMHIWNGRTFTDREEIAEWFRRILERFSRVRFEIKEIRIDGNTVTVHFRVTFHHDNQTRHATVTQHFHFKDGKLTEDRIHLNQED

SEQ ID NO: 1446 - protein, 117 aa, synthetic construct
PSEEEIKEWLKQFYEAMDKGDWQKLSEMLHPDVTITYEAFQITFHTLEEFIRWYRRFMSTVEIHRQITKIDIDGDTVTVHFTTHATHGDETYTMNFTDHYHFKDGKVTEIRSHSDQS

SEQ ID NO: 1447 - protein, 119 aa, synthetic construct
PSQEELREWVERWYEIVLKTRDYETAAQLFSDDWTYHVYNGTTFTTKEEFKEWFKRFMDRFKDVRIEIDSIHVEGDTVHVHLTMTTHHGDQQYHFRTTDTHRFENGRIKETRTREHDTR

SEQ ID NO: 1448 - protein, 119 aa, synthetic construct
PSQEELEEWVRRFIEEMDKTKDVDTVASYYSDDAQYHAYQGITFNDREEFKKWVEEFLKKFKDVHIEIKEIRVEGDTVTVHVEVHTTHGDQTYTFDVTRHFEFRNGKLVRDEERMRDTS

SEQ ID NO: 1449 - protein, 118 aa, synthetic construct
MDEEQIKEFIKRWVEAFDSGDADAVLSFYTPDSRVHFYNGETLTTLEEIKEWVERWQKSVKDAKREIKKIDVENGTATVHMTLHVTHDTHTITVDQTRHLKFKDGKLKEDHLHEDQKP

SEQ ID NO: 1450 - protein, 117 aa, synthetic construct
MSEEELKEWKKRFFEAFNKGDLDKIAELFTDDSTVHFSEGITLNDREEIKEWFERFMKRFERFRIEIKSIHIDGDRVTVHVEVHFTQNGQDFTTEVTAHDQYSDGKIKESRFHFRTR

SEQ ID NO: 1451 - protein, 117 aa, synthetic construct
MSEEEIKEFKKRLVEALNKGDLDKVAELLDDNSRFEDSEGTELRDREEIREWFKQMFENIQQTHIEIKEIRIDGDTATFHVEQHTTHNGKQVTVEVTSHDRYSDGKLTETQVHRRQR

SEQ ID NO: 1452 - protein, 122 aa, synthetic construct
PRDPSQILEWLLKALYEIFQNNDADAFAEMFSDDWTLHVWEGITYTTKEEVKEFFERFVKRYPDTQFQVDRVEVDGNRITVHVTVHTRHGDQTYTIHQTEHHQFDHDGKIKETRIHSDEKPT

SEQ ID NO: 1453 - protein, 122 aa, synthetic construct
PRDPEQIAQTVVRRFYEVFNKGDADAFLEMISDDWTFHDSNNRTYTTRDEVKTWFEEFLKRFPDSKFEFKRVEIDGDTVTFHVTVHVNHGDKTVTYHVTEHHHFDKDGKIKETRAHWETREV

SEQ ID NO: 1454 - protein, 122 aa, synthetic construct
PRDPEQIKEWVVKAFAEAFNSNDWELFMSIITPDWTMHDSSGTTYTTMDEVREWYERFLKRYPDAKFQVDRVEAEGDTVTVHVTITVNHGDKTYTFHQTEHHKFDHDGKIRETRFHIEQRPT

SEQ ID NO: 1455 - protein, 122 aa, synthetic construct
SRDPSQIAEWLAKRLLEALNRGDVDAVMSLYTPDATMHIYRGETFTTLDEIRKWFETFLRTFPDTHFQIDSVEVDGNTVTIHVTVHTHHGDKTVTFHITSHFTFDKDGRLKEEHIHTEQRDT

SEQ ID NO: 1456 - protein, 121 aa, synthetic construct
PGEEAIKELKKRMLEALDKGDMDKFKSLFHPDARVTFSRHQRTYHNLEEVVKFFKEVTEKFKDMRHEVKEIRIDGNKVTVHVTVHVTHDSGQTVTIDVTEHDRYDHNGKLKETDSHFNQKN

SEQ ID NO: 1457 - protein, 121 aa, synthetic construct
PGEETVKEVLRRFYEAFNHHDLDKLMSHYAPDATVTFSREQRTFKTKDEIRKWFEEVLKKFKDARREIKEIRIDGRQVTVHVTMHVTHDNGQTITIDVTQHFRFDDDGRIVRDDSHFNQRN

SEQ ID NO: 1458 - protein, 118 aa, synthetic construct
MSQEEIKETLARYIQEAINKGDADLLRELYHDDATVTFNGRTFNSRDEFKEWFERWFKSVDDTKAEIKSIEVDGDTATVHVTIHVTHGDQPVTIHVTSHFVFDHDGKIVREEINAQST

SEQ ID NO: 1459 - protein, 118 aa, synthetic construct
PSQEEIKEFVRRIIEEAFQQKRVDLAARFYTDDVRMTYNGQTFHSKDEIREFLERFLRSVDDTKVEVKSIEVDGDKVTVHVEVHQNHGDQTQTYHITRHITFDKDNRIKEDELNQQST

SEQ ID NO: 1460 - protein, 122 aa, synthetic construct
PEDEEKLKRWKKRFVEEVFRTGDADKFLSYVHDDATVHFSSTQYTTKDQLRKWMEEWSKFEDVKVKIDEIRVDGNTVTVHVTVHATNSTTGKTVTFHMTSHDRYKDGKLVESRIRIDPQPQE

SEQ ID NO: 1461 - protein, 115 aa, synthetic construct
PDQEEIKRLLREYYRYLDTGDAADELFDEDWEFHNNGRTFTTKEQIKDYLRELQSFKDMRREIKEIRVEGDHVTVHGEVTRNETDKTTTVHFTDTHEVHNGKFTRTQAHYDEKDT

SEQ ID NO: 1462 - protein, 116 aa, synthetic construct
TDEEQIREILHRFYRAIDNGDWETVSRLVHDDATFHDSGSKRTFTTREEVAEWVKQVASFDTAHHLESIEIRGDTATVHVQTHETHNGRKVTVDATHHWRFKDGKVVEVQGHYDST

SEQ ID NO: 1463 - protein, 115 aa, synthetic construct
MSEEQAREFVERVLRRMSTQLDDDWRAHVHTKDSTITFENPREFLEWWKKWARSRSRDIKFEIKRVEVDGDTVTVHVTVTMHHNGQRFTYHVTEHHHFRNGKLVETHFHIHQEDG

SEQ ID NO: 1464 - protein, 119 aa, synthetic construct
PEEEIREWVKRFIEAFDKGDWEKLVKLLHPGVTIHFDGDNVTITSQEEFREFVERWLSRFDEMHRTPNEVHISNGTVTVHWELHVTQGDKTYTIRVTTTFHFKDHKLTEIRIHFDTQPQ

SEQ ID NO: 1465 - protein, 120 aa, synthetic construct
ASEEEIKELDTQRLEAIDKGDMDRVREYFHPDAEIHISMHNKTFTSRDEFVEKFMREFLSQFEDVHRQIDQMHVDGHTVTAHVTVTFHHNGRQYHYRVTYTVTYSSKKLTRMEIHVDSGG

SEQ ID NO: 1466 - protein, 118 aa, synthetic construct
PSEEEIKEFKERLVEALNNGDLDTFISLVTPDATFHYSEGITFTDLEELREWVERFLKTFKDLRIEIKDMHIDGDEVTVHIQFHVTQNGKQVTIDVTYHDRYDKNGRLVSSRAHFNQQ

SEQ ID NO: 1467 - protein, 118 aa, synthetic construct
PSEEEIRDTLRRFYEAFDNGDIETLQRLLHPDVEVHFWEGITAHSLEEFTEFVRRFLSRFKDVRREIKEIRIHGDTVTVTYTMTVTRNGKDYTYTGTDHFHLDKDGKIKRVQSQVHQT

SEQ ID NO: 1468 - protein, 118 aa, synthetic construct
PSEEEIRDWLRQFYEALDRGDADKAADLFHPDAELHFSEGITLTTKEEIKEFVERWLKRFPDTAHHLESIHIHGKTVTVHVTVHVNRNGQTFTFHVTDHYHFDDDGQVKRMESHINQS

SEQ ID NO: 1469 - protein, 118 aa, synthetic construct
PSEEEIKELLRRFYEAFNNNDLDKLVSYFHPDAQVHIFQGITFNNLEEFKEWLERVLKTFKDVQIEIKRIEIDGKTVTVHVTVTFTRNGQTFHVDVTHHWHFDDDGQIVRVEEHSNER

SEQ ID NO: 1470 - protein, 118 aa, synthetic construct
PSEEEIKQLLKRYYDAFDNNDLDTLLSLLHDDWTYHNNSGNTITDREEFKEWVKRWLEKFQDTAHHMESIHIHGDTVTVHVTLHVTHNGKDITFHTTDHHTFDHDGKIVRTEAHVNQS

SEQ ID NO: 1471 - protein, 123 aa, synthetic construct
PEPDKEKIKQFVERFAEAFQKKDVDAIASLFHDDATMHVYNGQTFHSKDEIKEWFKRFVDNNLDTKVEIKEIRIDDSRGQVTVHWTATVHHNGKQVDIHATTHFVFKDDKIVRVHIHEDQHTD

SEQ ID NO: 1472 - protein, 120 aa, synthetic construct
PSDEEIEEWVRRFYTAFNNNDWKKLADLISDDATFHDSRGEEITDREEFREWFERVIKTFKDIQLEIKSIEFDKKTPRVTVHVTMHVTHGDQDTTIDVTHHWHFNKDGQIVEVRAHFNPR

SEQ ID NO: 1473 - protein, 120 aa, synthetic construct
PSEEEIRQWVRRWFEAFNNRDVDALASLYSEDATIHFSEGVTVTNREQFKEWLERFTKRFKDYRLEIKEIRVDKSDPTVTVHVTIHFTHGNEDRTIDVTQHFKFDKDGKLKEQRVQIDER

SEQ ID NO: 1474 - protein, 119 aa, synthetic construct
TSEEQIKEWVRQFYEALNNNDWEKVLRLLDDDWQFHNANGETYTTKEQVREFIERFLKKFSDSRIEIDDMHIQDGTVQVHVTIHVTHPDGSTQTVHIQEHHRFKDGKITETHQHTDEST

SEQ ID NO: 1475 - protein, 119 aa, synthetic construct
TSEEEIRDVIRRLIEAFNNNDWEAILRLLDEDWQMHISKGETYTTADEVREWVERFLKSFPDTRVEIDELRIENGTVEVHVTFHFTDHNGQDFTIRVTEHHHFKDGKLTETHFHFDESR

SEQ ID NO: 1476 - protein, 118 aa, synthetic construct
MSEEELKEFVRRLVEAFNKGDLDALAELYHPDFTYHHDSGSTIRDKEEFRQWVREWVEKAKDYRIEIKSLEIRGDTVTVHVQVHVHDDSRTTTVDVTSHFRFQGKRITEEHAHSDQKD

SEQ ID NO: 1477 - protein, 118 aa, synthetic construct
MSEEEIRDFVRRFIEAFNNGDLDTLAELVHDDATFHFPDGSDIKDREEFKKYLEELFRRYGDFRIEIHSIEVRGDTGTVHWTLHVTKPDKHHTFHATTTFHFRGKRIVEVHFHVDQHD

SEQ ID NO: 1478 - protein, 117 aa, synthetic construct
DPREEIKEIKRRFVEAFDRGDIDALISLFHPGFTFHWNNRTFNNPEEVRKFLEELIKRYKDSRHEIKSLEIRGDTATVHVQAHFHHEDKTRTITVRVDDRYKDGKITESRFHEDQDG

SEQ ID NO: 1479 - protein, 117 aa, synthetic construct
PDQEEIKEIDKQRFEAIDNGDLDAVMSFFHPGATMHWNNRTFTTPEEIRRFFEEWLKRVKRSRHEIKEMHIEGQTVTAHVDVELHHDNETKTVTVTYTITYKDGKIVEFRSQEDQKD

SEQ ID NO: 1480 - protein, 117 aa, synthetic construct
ASEEEIRDWLRKFYEALNKRDADTVASLFHPDATYQDSSTGKEYSYEEFKRWVERWLKSARNFHIQIEEIRVDDNTVTVHYTVTFNHPGETQHYRFTDHFHFRNGKLTRMQSTTDNR

SEQ ID NO: 1481 - protein, 122 aa, synthetic construct
PGEEEIREIVKQFFEALDTGDMDKLRELVHPDAQFHFTHDGKTITMHSQEEFLEYVKQLQRKFKDVKRQIDHIEFNKDTVHVHWTMHVTDEDGTTVTFRGTTTFHFRNGKIVEVRFHVDTEQ

SEQ ID NO: 1482 - protein, 122 aa, synthetic construct
PGEEEIRRILKEFYEALDKGDLDRIAELVHPDAQFHYTQNGNTVTFDSKDEFKKWVEEWKSQHPDVKRQIHRIEVNGNTATVHYTVHVNHPNGRTFTFHATDHFHFRNGKIVEVRSHVEQRD

SEQ ID NO: 1483 - protein, 119 aa, synthetic construct
PEFEERVKDWKKKFVEAYQNNDLDKLVSLLHDDATIHHSSGETITNKEEIREFLKKLLDTNKDARVEIKSIEIRGNTVTFHVEMHTTHNGQKVTFRVTVHDRYENGRLKESRFQFHQEE

SEQ ID NO: 1484 - protein, 121 aa, synthetic construct
SLSEEEIRQWVTRFIEAMFNTGDWKQAADLLHPDAKITFNSHQRTFDMEEMIQWLREWKSRVSDFKIQIESIEVRGDEVTVHWTATVTHNGKTYTVHGTTTFRFRGNRVTEVRIQLHTSDT

SEQ ID NO: 1485 - protein, 118 aa, synthetic construct
MSEEEIKEFYVRFFTDAFNRNDVDALLEIYHDDVTFHHADGSTITDKEEFKEWVERFIRRFKDIRIQWDRIEVDGDRVTFHITIHFRQGDQDYTVHVTVHVTFSDGRITEEHEQSDES

SEQ ID NO: 1486 - protein, 118 aa, synthetic construct
PSEEEIREWLKRFYEALDKGDLEAVKRLLSDDATIEISATQKEYDVEEFIEWVERVQKRAKRIHREIKEIEIRGDTVTVHVDVTFHHKDKTVTVSFTETHHFRGKRLVSTHIHVDERE

SEQ ID NO: 1487 - protein, 118 aa, synthetic construct
TSEEEIRQILRRLYEAFNNKDLDTLEELFHPDATMHVEAENRTFTNIEEIKEWLERFMKRFDVKLDITRIEVTEDKATVHVKVHMHTKDSTHTFDVTEHHHFKDGRLIETRIHIRQVD

SEQ ID NO: 1488 - protein, 121 aa, synthetic construct
TSEEEVRRIKKRLVEAFNNHDWEALKRIFHPDATIHFYNSDGSTITFTNPEEFEKWFREWAKTFPDVKIQVDSLEVRGDTVTVHVTMHVTHNTQDYTFKVTTHDRYKNGKLTETRGHYNTT

SEQ ID NO: 1489 - protein, 121 aa, synthetic construct
MSEEEIKQVLKRFYEAFNNKDLDALSELFHPDATIHFTNHDGSTTTFEDPSEFRRWVEQMLRTFEDMKIEIKEIRVDGDTVTSHVTVHVRHGDQPQTYTVTEHHRFKDGKITETRTTWHQQ

SEQ ID NO: 1490 - protein, 121 aa, synthetic construct
ASEEELRQAMRRFYEAFNNKDIDKLSELFHPDATMHVENPDGSRITFHDPDEIRKWIKQTADTNPDVKIQIDEIRVDGDTVTVHVTVHVTHNTQPQTYTVTEHHHFKDGKITETRVTFNQQ

SEQ ID NO: 1491 - protein, 119 aa, synthetic construct
DEDKEEIKDIIRRWVEAFNRRDVDALLSLYHPDAQVHFSNGETLHNLEDIKKFLARLFSNMQEFQVEVKSIHIEPNHVTVHMQLHTTHNGEKYTYDITVHFQIKDGKIVRQHVHTNEKK

SEQ ID NO: 1492 - protein, 119 aa, synthetic construct
DEEQEEIKEILRQYYDSFNKNDLDKAASLMHPDATVHYANGETLHSKEEIREFLERLMKTWQEFHVTIEEIRVEPNHATVHYTVHVTHNGKKITYHGTDHYRFENGKIKEVHSHRNQRD

SEQ ID NO: 1493 - protein, 119 aa, synthetic construct
PEQEKEIKEILERYYEALDRRDVDAVLSLLHPDVQVHHADGTTLNSLESVKEFIERLLKRYQEMQHTMEEIHFEPDHATVTYTMHTTHNGQKYTFHGTDHFRFENGKIKRIESHVNQRD

SEQ ID NO: 1494 - protein, 120 aa, synthetic construct
PNPEQITELLRRFLEEAWERGDLDALEEFYAPGAQLHIWNGITFNDREEIKRWFKEMFEKFPDTHVEIKHVEVRGDTVTVHMTFHVRHGDQKYTYHITSHFHFDKDGKLRREQAHEQQQR

SEQ ID NO: 1495 - protein, 120 aa, synthetic construct
PNQEQIVDTVIKWFEEAFNKGDADAFASFYSDGAQYHNWQGITAHSREEIKELFERFLKKFPDAQFEVKSVEVDGDTVTFHVQVHVRHGDQKVTYHVTSHMHFDKDGRLVEEHVHLQEQK

SEQ ID NO: 1496 - protein, 117 aa, synthetic construct
MSEEEIKEILRQLYEAFDRGDWEKLARLLHDDARMHVSEEGRTFTNKEEIIRWYQQWWSRHETQRGEIDIHIHGDTATVHVTVHHHNGDQTHTVDYTHHWVFKDGKVVEVRIHTDSK

SEQ ID NO: 1497 - protein, 118 aa, synthetic construct
TDESQIREWKKRYMEALDKKDLDAIEELIHPGATFHFADGRTFRDKDEYKEWVRQWLSKYDPKSREVHIHVDDSRTVTVHFTVTVNQNGKEVHIHGTVHDRYENGKLVESQYHHEQRD

SEQ ID NO: 1498 - protein, 118 aa, synthetic construct
MSEEEIREFIRQLLEALDRGADEAASYYHPGSTMHVHHKDGTITWNSKDEIREWLKRFQSQFEFRHEVEDMHIDGNTVTVHVTVHVTHNGETRTYTVTRHFHFEGKRLTEDHNNWDQA

SEQ ID NO: 1499 - protein, 118 aa, synthetic construct
ASEEQIRQIVRRLFEAMNNNDVEKLKELYHPDARIHFAGEGYTATTREEFAEWFKKFWSRNQFTIEIEDMHIDGDRVTVHFTVHFTHGDQPFTTRITSHFQFKDGKLVSEHIHMNTEQ

SEQ ID NO: 1500 - protein, 118 aa, synthetic construct
MSEEEIKETLKRFFEAFDKGDADKLRELIHPDATFHFTFSNTTITTLEEFVEWLKEFLKTFQIHLRHIESIEIRKDEVTVHWTMTFTHNGETYDIRVTTTFRFKDGKIVEVRFHFNQT

SEQ ID NO: 1501 - protein, 118 aa, synthetic construct
MSEEEIREWLKQFFEAFDKGDLDKLEELFHPHARIHDESSNTTFTSREEFKRWVKEFIEKFQIHLVTIHSIHIHKDTVTVHWTLQVHHNGQTYHVNATTTFHFRDGKLVEVRFSYNDT

SEQ ID NO: 1502 - protein, 118 aa, synthetic construct
PSEEEIREILRQFYEAFDKRDWKKLAELWHPDGTMHVTATGTTATTLEEVIRMIKEFASKFDFQVIQIDSIEFNGDYVTVHVTITFTHNGQNYTVTVTETHHMKDGKIVETRMQFDQQ

SEQ ID NO: 1503 - protein, 117 aa, synthetic construct
SDEEEIEEIVRRLFEAMSKTGDADAAAKLLHPDAQYTNSDEQRTYDREEYIEMIERRVKNDLKVHIQIESIEIRGDTVTVHWTATTTQGDEDQTYRYTTHIRFKDGKIVELRETTIT

SEQ ID NO: 1504 - protein, 117 aa, synthetic construct
SDAEEIEEILRRMFQRLARQKDPEAFAQIVHPDAQFHDSSTNKQYDREEYKEWWERLIKNGIDTQIHIESIEIRGDTVHVHWTAHHQQGDTTHTVRGTTTFEFKDGKIVRIQFTHRT

SEQ ID NO: 1505 - protein, 120 aa, synthetic construct
DSEQQQRIKEWLQRFFEAFNNNDLDTLKSLFDDDWQYHDQSGETLHSKEDFEEWVKKFLSTFPNVQIEIKSIHIDGDTVTVHVQMHVTHDGKTYTFHVTEHHRFENGKLKETRITFDPHP

SEQ ID NO: 1506 - protein, 120 aa, synthetic construct
PSQEEQIREALRRLYEALNRGDIDTLVSLFHPDWQFHHSSGQTFHDLEEFREWAERWARSNKEYRVQIDEIEFRGDTVTVHVTIHVTHDTGTRTIHVTDTHHFRNGKLTETRARYDEKQT

SEQ ID NO: 1507 - protein, 122 aa, synthetic construct
PGEDTEKIKEFIQRFIEAVNHNDADALAELFHPGATVHFSDGVTITSKEEFKEWLEEWIKTFKDVRIEIKSIHIDGKTVTVHIQVHVTDKSTGQTFTFRVTVHDRYENGKLKERRIHIDKSG

SEQ ID NO: 1508 - protein, 120 aa, synthetic construct
PDFQEEIKEIDTRRVEYVWRTNDADALFEIFHPGAEIHYYSEQVTLTDLEELKEWFKQLVERFPDVKVEIKSIEVRGDRVTVHVTFHFNQSEGTTTYQVTYTVEYKNGKITRYEVHIHQT

SEQ ID NO: 1509 - protein, 118 aa, synthetic construct
PSSEEIKEFIKRLLEAWNKDADEFYEIVTEDWQYQDARTGQTYDAEEFREMVKQWQETFGDVKVEVHIDARLENDTVTVHYTVHVNTTTKTTTTDFTEHHTFKNGRLVRTRQHADTKG

SEQ ID NO: 1510 - protein, 118 aa, synthetic construct
ASEEEVEDFKRKFVEAFAKDWREVRKIMTPDSTFIDARTGTEYSLDEFADWVRRFQEKFSDIKFEIDFNLEFHGNRVTVHVTFHANTTNRTYTFHYTFHDEYRNGKLTRSQIHTRQEG

SEQ ID NO: 1511 - protein, 118 aa, synthetic construct
PEDEEKIRELVKRFYEAFNRRDLDALEELFHDDGRYHNSSDNNSYDKEEFKEWVETFLRQFPRARMEIKSIEVRGKTVEVTVQVHLYHPNRTQTFTVHDTYHVRGDKIVEIRSHVDDG

SEQ ID NO: 1512 - protein, 118 aa, synthetic construct
DESTEKIRQWLKRYIEALNNKDLDALESLFDKDWRYHDARENNSYDRDEFKKRVETFLRQFPNVRFEIKEIHFDGNTVQVHVQVHVHHDDQTRTYDVTEHHRFEGDKITETRVHHDST

SEQ ID NO: 1513 - protein, 126 aa, synthetic construct
PREDEMKEKIKELKRRIVEAFNKGDLDALASLFDPGATFHLSNGQTFTTKEEFREWVKQFIDANIKIQVTSMEIQVTDDTHVTVTVHVTIHQTGTGKTVNITQHDHYRFENGQLKIVEVRTQVDEG

SEQ ID NO: 1514 - protein, 128 aa, synthetic construct
PKDEKAKEDIKEWFKREAELFNNGDMDAWASLFHPGSTFTDASTNQTYNRDQLKEWFTEMFKNDVKIEIKELRIEKKSDKTFTVTVHVTFHMNHNGETRTVHITFHDHFELNGSEWRLVHRRIQTDGS

SEQ ID NO: 1515 - protein, 128 aa, synthetic construct
PDQEKAKEDIKELVERFYRAFNNNDLDALKSFLAPDWRYHDSRTGQTYNAEQFLEMVEKMLRQDTHLQIDSIRIEQKDENEFTVTIHVTMTRTHNGQKQDIHVTDTHRVRKHGDGFKFVETRTRFDNG

SEQ ID NO: 1516 - protein, 128 aa, synthetic construct
PREDEIKEAIKETLKRLYEAINRGDADAVAELFAPDWRYHNKSENQTYNKEQFREMIKKMFSNDTRLQIDQIDIEIKSKDTATVTVHVTFHTNHNGQTYTVHVTDTHHFEYQDSRLLLRRTESQFDGG

SEQ ID NO: 1517 - protein, 129 aa, synthetic construct
PSEEDQEALRQTKRRYVEALNTGDLDTLSELLTDDSTFHHDDQTFQISKEEFKEWVKKMNSNDTKIQIHSIEVHLDSDGTTFTVTVHVTVHHNHGDKTKTVHVTTHDHYKKTDNDFKLKETRTHTDERS

SEQ ID NO: 1518 - protein, 129 aa, synthetic construct
ADPSDQEAIRQVVERYYEALNKGDLDTLEKLLTDDWTLTTDNSTQPVSRDEFKERVKELLKNNTQIQIHSIEVRQHDNGTEFTVTVHVTVHHNHGDRTKTVHVEDHHTLRKDDSDFKIVHTQSHRDERS

SEQ ID NO: 1519 - protein, 129 aa, synthetic construct
PDPNDEEAIREIVRQMFEAFNKGDLDAIASYYDDDVTFHHDNQTFQISKEEWKKWVEEVLRRDVKLEIKSIEVRQHPDGTHFTVTVHVTVHQNRGDKTHTVHVTRHFFFRKDDSDFKLKEDREHTDNRP

SEQ ID NO: 1520 - protein, 125 aa, synthetic construct
PGEKTLQEAIEETDRRRVEAINKGDWKKIKELFTDDATFHHQSGQTYDHEDFLRWVKTMHSQQWQFEIKSIEIHIHPNGRTVTVHVTVTATNQRTKQDVQFHYTIVYVFENGDVKVKEMHLSTDH

SEQ ID NO: 1521 - protein, 125 aa, synthetic construct
PGEETAEEQIREWKKRFIEAVNNNDRDKVKELLTDDATFHDANGQTYDADEFADMVEEFARQDWKIQLDSLEIRFQPDNEHVTVHVHITVHNDSTGTQIHFDATDFYRFENGSLKLVSTQYHTNN

SEQ ID NO: 1522 - protein, 125 aa, synthetic construct
PGEEEAREKIRQVKRRLIEALDKGDWETVKRLFDDDFTFHDASGQTYDADEFRRMVEKMASHDVRREIKSLEIRRDSDNHNFTAHVHLTVQDSRTGQEVKFTATDFYRFENGSVKIVETHLHTDS

SEQ ID NO: 1523 - protein, 126 aa, synthetic construct
DVDPSQIEQLEELKRRFVEALNKQDLDKMKSLMDDDSTIHSNPMNRDQFKEWVERLAKATKDARIEIKEIHFQLRSKDTVTVTVHITFHATHNGKTKTVHITYHDHYVQTKDGWKLKSTEERSDEP

SEQ ID NO: 1524 - protein, 126 aa, synthetic construct
DMSKEDQEQIEEWVRRLIEAINKQDRDKVLSLYHDDSTNDSNPMDAEELKEWIEKMLRDLKDSRIQIEKIDFEQLDKDHVRVTVHVTIHRTHNGRTQTVTVTSHFIFEKDKDGWKLKSEEERRTNQ

SEQ ID NO: 1525 - protein, 129 aa, synthetic construct
SQNEEIKKAVRELLKRLFEAFDKGDADAMKSLMHPDWRYTDASTQTTYDLDEFREWVERWQRNFSTRHEIKSIEIEIKPDGTVTAHVHVTTHTTHRNGEKRTFDVTETHHFDIGPWKVKETRVQYDNKG

SEQ ID NO: 1526 - protein, 129 aa, synthetic construct
PDDEEAKEAVKQFLERYFEAINKKDVDALRSLFDDDWRYYDARTNQTYDADEFAEWVERFQSNFDSQIHIHSIEIRIHSDGTVTVTVHVTVHMTHPDGQTQTVKVTEHHRLDRREWKILETRAHWDNGG

SEQ ID NO: 1527 - protein, 129 aa, synthetic construct
SDEEEIKEAVKEVIRRYMELMDNKDADAVASLYAPDARLHNADRNETYNFEELKEWYRRFLSNFDSKHDIKSIEIRIHPDGTITVHVHVEVHVTHKNGQNHTVRYTYTFVLDQSEWRIKEVHVHTDNGG

SEQ ID NO: 1528 - protein, 130 aa, synthetic construct
MSDDEMREAAKDWLRRYFEAWNKGDLDKLRKLYHPDATFHDSSGQTYDKEEWVKRAEELLKTFDFTLQVDEVRAQVHPNKTHITVEVHVTAHVHHQSGETRTQTVTSEFHFQFENGQIYLLEEHVTTEQK

SEQ ID NO: 1529 - protein, 126 aa, synthetic construct
SVGEETIERLIRRFYDAMNRGDLDEFISLLHDDWRWHDTDRGETYDKEEWREMWERRFRNSDFRVQIDSMEIRQVDENEYRVTVHVTVTHHDGNRTRHIHIEDHHRFRQTDGELKLVETHTHTDPG

SEQ ID NO: 1530 - protein, 126 aa, synthetic construct
PMSEEAVREVIRRWFEAWNNKDLDKLASLYHDDATFHFKSHNQTYDKEEWLEWVKQLLRHSDIKVQVDSLEVRQVSKDEYTVTVHFTVTHHDGNETRHIHITAHFHLRYSKDSVKIVEQRDDYNSG

SEQ ID NO: 1531 - protein, 126 aa, synthetic construct
PMGEEELKKFLKRLYEIMDSGDADKFASMFHDDVTFHNADTNQTYDKEEMLELLRRFASNAETHRQIDSIEIRYVDKDEIRVTVHVTVQVHQGNKTEHYHITHHWVFRYTDNRVQIVEVHESRDPG

SEQ ID NO: 1532 - protein, 126 aa, synthetic construct
SSDREAVERMVRRYFEAWDKKDWEKLASLFDEDWRYHDAETNQTYDREEFIEMFRRFASNAQVHHEIHSLEVRQVTPDTFTVTVHFTVHEHHGNETHTFRVTEHHHFKDTKDGVKVQETHVHFDSE

SEQ ID NO: 1533 - protein, 126 aa, synthetic construct
PASQEQVERLIRREAEALNKNDLDAWASLFHDDATFHDPDRNQTYDKEQMRKMIEEFIRNTDFRVHIDSIRIEQTDKDEYTATVHWTIHEHRGNETHTYHATTHDRFRYTDGDLKIIERHTTTDPG

SEQ ID NO: 1534 - protein, 127 aa, synthetic construct
DTEELEEAARQIVRRLIEAFNRGDMDELSELYAKDEFTFTQYQGQTFSYEEFITMLERRFSNDTKVQLDSIRIEIKSKNEVTVEVHVTFHTHHNDETQTYHVTSEMHIRKEGDSWKILEEHERTNST

SEQ ID NO: 1535 - protein, 127 aa, synthetic construct
SDEEAEEAARELVRRYYEAINKGDLDALQSLIDKDTWRYHTSSGTTYDYEEFVKMIEELFKAGVHVEIKGIEVRIVDKDEATVTVNVQFHQNHGDRTKTVDVEDHHHFRKKGDSWKLTRTETHHRST

SEQ ID NO: 1536 - protein, 127 aa, synthetic construct
DQPEDDEEIKELIERMYRSLNENDIDKAASLLDPENFRYHTDSNTEYDYEEFLEMIERMASQGFRIQIDSLEIRWVDKNEVRVTVHVTIHVRHGDKTTTFHATHHWEFVKEGDSWKIKRLETHRNST

SEQ ID NO: 1537 - protein, 127 aa, synthetic construct
DEEEIKSAIEELKRRLIEALNRNDMDTIRSIFDPTNFRFHQWQGQTFDFEEFITMIERRASAGFEIQLDSLEIRVQSSNSATATVHITVHFHHGDKTQTYHYTFHDHYRKEGDSWKITHTQEHRHST

SEQ ID NO: 1538 - protein, 120 aa, synthetic construct
PDPSERQEQIKRIKERYIEAVNKGDLDEIRELIHDDARVQAEPLDKDQIIKMVEEITRNDLKLQLDSVEIHVDENDQVHATFHVTVTDGRTGQTTHVTYHDVYEASTELKIKSTTSRNDS

SEQ ID NO: 1539 - protein, 120 aa, synthetic construct
ADPKEIIEQAEEVLRRIYQAFNEGDVDAVADLFHPDARIQSEPLNRDQFRDWVEKFFKAGFEMHVESIEFRVDHNDEATVHVHVTVTDRRTGSSIRVQETHRVRYSNGLRIVSTRTHNDS

SEQ ID NO: 1540 - protein, 120 aa, synthetic construct
PDPSEIISQAREILTQFYEAINKGDLDRIEELLDDDVRIHSSPQDKEQFKEWVEKLTRNNFHLEIKSMEFRVDHSDEITVTVHVDITDQRTGRTITVTNHDFLRYKTELRIVSHTWQNNS

SEQ ID NO: 1541 - protein, 120 aa, synthetic construct
IDPKEAEEQIRDLVRRFYEALNKGDAEAVARLLHPDVRVHTNPLDREQIKEWVEKFFRNNFEVKIDDLEIRFDSSERVTVTVHVTITDRRTGTTFHVTHHWFIDQSTELKIKHVREHNTS

SEQ ID NO: 1542 - protein, 120 aa, synthetic construct
PSEEEQREEIKQLKERFAEALNKGDVDAVMRMYHDDARVTANPINKEQIKKWVKEWHDQGWEVEVKSLEIHVDENEEVHATAHVTVTDRRTGQTFHVTYHDVYVLSNGLKIKSTQSHNDS

SEQ ID NO: 1543 - protein, 129 aa, synthetic construct
PGEESAREIIKEIKRRYVEAMNNGDADAAAAFFTDDATFWHNGQQQPLSREEFKKMIEEFFSKIDVKVEIKSIEIRIYDDGRIEVTVHVTFTYSETGTTADVDQHDVYREKDGTMKIIESRTHTRRKQS

SEQ ID NO: 1544 - protein, 129 aa, synthetic construct
PGEKTMEEQVREVIQRFYEAMNNNDLDTLAELFTDDATFYHNGQQYDLSKEEFKKWMEEFLRHMDVKFEVDSIEIHIHDDGTVTAHVHVTLKHDKTGRTFEVTETHFFVVRNGSVKIKETREHTDSTKD

SEQ ID NO: 1545 - protein, 129 aa, synthetic construct
PGEKTQQEQVREFVRRLITAFNTGDADAIKSLYTPDATFTHNGETYQLDQDEFKEWVEKFIKNLDFRLEIKSIEIRVDHDGTVTVTVHVQQTEDKTGRHFHFTRHFFFRFKDGEIRLKRDEEHTEERKD

SEQ ID NO: 1546 - protein, 129 aa, synthetic construct
PGKKTIQEQVEEIVRRYYEALQNRDADKIASLFDKDATFTENGETHPLDKEEFKKRVEETLRKFDFRVHITGIEVEVKDDGTVTVTVHVEFHFKETGRTFKVTEHHQLRVENGSVKIVRTETHRDSTKD

SEQ ID NO: 1547 - protein, 129 aa, synthetic construct
PGKETIEEQIRQWVHRYYDAFDKGDADTLASLIDDDWRYTTDGQTFQVSREEFKEAMEKIAKSVQTAHQIESIEIRVDDSGTATVHVHVTVHDSKTGRTFRVTDTHFFQLKDGELRLVETRTTTRSTSD

SEQ ID NO: 1548 - protein, 123 aa, synthetic construct
SSEKEIREAVKEMIKRYIEAFNKGDLDALKDLYDKDARFHMGGYNLEQYTEWVRQLLESGTKVSLDSVEIHVNDDGTATATIHVTFHTHTPTSTHTVHVTRHLHFRVQDGRYKIVRDEIRENH

SEQ ID NO: 1549 - protein, 128 aa, synthetic construct
MSEEERQSAVKEVLRQLYEAINKGDMDKVRSLVHPHATFHDSSRNQDYNREEFIEMAEKLTKNGVHFEIKEIRVQFTDKDEATVTVHVTVHHHHGDKTKTVQVEEHHRFRFKDGDVKLVETRAHFDDT

SEQ ID NO: 1550 - protein, 128 aa, synthetic construct
MSEEELKKAIKEFDEERAKAFNTGDWEKLRSLMHDDATVHNYAEGQTYNRDQFLEWVKKMHSQGTRIQITEIRVQVTDENTVTVEVHGTVHTQRGDQTYTVHATYTMFYRFNNGDIKVIRMEIRLDNS

SEQ ID NO: 1551 - protein, 128 aa, synthetic construct
PSEEELKKQIEETLRRLFEALNKGDLDAFLSFVDDDWRFHNTATNRTFDREEFRKWLKEFKENGAQIDIHEIRVQVTDQTNVTVTVHVTVHHNRGDRTTTIRVTEHHHFRFENGSVKLVRTQVHVDNT

SEQ ID NO: 1552 - protein, 128 aa, synthetic construct
ASEEELRTQIKEYKRRLVEAFNNGNWEEFKRLVHPDATFHISATQRTYNADEFVEMLKELWKNGTRIEIKQIDIQFGERTHVTVTVHFTVHTNHGDKTRTIHATAHDRYRFKDGQIYLIESQFHFDNS

SEQ ID NO: 1553 - protein, 128 aa, synthetic construct
MSEEEQKKAVEELVRRLVEAFNKGDLDELKEIYAPDATFHYNSTQRTYSKEEFIKMVEELTKAGTQIEIKEIRVEIKDDTTITVHVHVQVHTRRGDRTTTFDATRTFHFKLENGSFKLKHDQVTIDNT

SEQ ID NO: 1554 - protein, 128 aa, synthetic construct
MSEEEMERQIREFKRRFIEAFNKGDMEKLKSMFHPDAQFHFANTQRTYNAEQFIEWLKRVLDNDTQIQIDSMEFRFGDSTHVTVHVHVTVHTNHGDRTYTVRVTATDHYRFENGSLKLVRSQFHHDNT

SEQ ID NO: 1555 - protein, 125 aa, synthetic construct
PSKKDEEDIREFKRRYIEAFNKGDWEKLKRLIHPDATFHQNNTGRTFDVDEWVEMLKQLADQGVKIQLDSLEVQQRSSETVTVTAHVTVHDSQTGRTRHAQQHDRYRKIGDTWYLIETRVTRHGH

SEQ ID NO: 1556 - protein, 125 aa, synthetic construct
PSKEQEEAVREILRRYVEAVNSGDADQLKELYHPDATFHQDDTGRTYDLEELREWYERMFRNNVRMQVDQIDIQVDDKDQVTVTVHITFHNASTGTTTHAQYHFTIRKEGDSWKIVEVHVRTHGE

SEQ ID NO: 1557 - protein, 125 aa, synthetic construct
PSKKQEEDIKEILKHYIRAINEGDVDAVASLYHPDARLHQDGTGRTFDYEEIREWYERMVRNDVKVQLDSVEIRVDDKDQVTVHVHVTYHNGKTGSTRHATQTFTVRLEGDTWKIVEVHVTTHGE

SEQ ID NO: 1558 - protein, 130 aa, synthetic construct
DEEEAQEQIKEMVEREVELLNKGDMDTWKSLVHPDATIHFSNGQTLTDRDEMKEWYKRFFETTNIQITIKSIEIQYGDKGEATVTVHFEMHRHTKDGTITAHFTAHIRVRLDNGGLKILSKEVHLDNRGG

SEQ ID NO: 1559 - protein, 130 aa, synthetic construct
DESEAEEQIREFIRRFIEALNKNDADTLASLFDDDWRLHVADGETITTREEFREWVRRFYSEFDFQIQVDSLEVQKSHEGHYTVTVHVTVHFHHKDGTVTAHVTEHHHFRRDDGGMKVVETRVTIDRRGG

SEQ ID NO: 1560 - protein, 130 aa, synthetic construct
DESESEEQIREFIKRYYTAFNNNDLDALAELLAPDWTFHHSNGSTITNLEEFKEWVRRLIERFNVQMEIKSLEIRKGDEGTATVHVTVQVTFHTKDGTYHATVHDTHHFQLDDGGLKLKETHSRWDHSGS

SEQ ID NO: 1561 - protein, 130 aa, synthetic construct
SESEAEEQIKEWLKRFYEAINKGDLDAAASLLTDDWRYEDSSGEEITSREEFKDWLRRVMERFNFQIEIKSIEVRYGSPDFYTVTVHLEVHFTHKDGQYTRDTTDHHVFRRGNGGMKIVETRVHWDDKGG

SEQ ID NO: 1562 - protein, 130 aa, synthetic construct
DQSETEEQVRETLRRFYEAVDKGDAETAARLLHDDWQFHNSKGETIHTLEEFKEWVERFFKNTDFQRQIDKQDFQPGPEGTMTVTVHVTIHFHHKDGTVTVHVTEHHHVRRDEGRLRIVRTQVHIDERGG

SEQ ID NO: 1563 - protein, 129 aa, synthetic construct
PSEEDEQAIREIVERFYEAINQGDLETIDRLVHDDATIHDSSTNTDYDKEQFIRMIEKLFKNDFKLEIKSIEIHQDGNNDFTVTVHVQIHVTHNGENQTYHVTHHWFIRKKDGRYKIVEVRIHWKGNPS

SEQ ID NO: 1564 - protein, 129 aa, synthetic construct
PSEEDQRAIEEMLRQFYRAFNTGDFEQIDSLVHDDATFEDKSTGQQYDKEQFREMFERLVKNNTKIQIHGIEFRSNGNNTYTVHVHVTFHTTHNGENHTQRVTETHVFEKRNGEWYIVETKFQYDGAPS

SEQ ID NO: 1565 - protein, 129 aa, synthetic construct
PSEEQERKLREWKQRYVEAFNKGDLETIKSLFHDDATFTDSSNNQSYDKEQFIERIRRLQSNDTKMQLDSMEIRLNGNNTATVRVEFTFTTNHNGKTQDQRFTYTDFYRFQDGSLKLVRTEIHRDGAPK

SEQ ID NO: 1566 - protein, 129 aa, synthetic construct
PSEEEEKEIRRLVKEFYDAFNNKDLEALASFYAEDAKFHDARTNQTYDREEIKRMIEQMLRNDVKMQVHSIHVQSNGNNTITVTVHVQVHETHNGKNQSFTFTQHYFFVKQNGSWKLVEDRLHLDGAPQ

SEQ ID NO: 1567 - protein, 130 aa, synthetic construct
PDPSQEEEIKRLLKEYYEALDNGDLDTAASLMTDDWRYHDARTGQTYDKEEFKKMVGERFKRSDFQRHIHGIQIDDAKGNTVTVTVHVTVTHHHNGKQFHTHYTDTHHLTFFNGELKIVETRSQWDDKPD

SEQ ID NO: 1568 - protein, 130 aa, synthetic construct
VDPSQEEKVRQFIRRYVEAWNNKDVDALASLYADDARYQDSRTGQEFDKEEMRERYEKFAKNSDATMHIDSIEIKDAKGNHVTVTVNMTVHVTHNGKTITIKVQYHFFFKFENGELKLKRLTSTHDEKPD

SEQ ID NO: 1569 - protein, 130 aa, synthetic construct
ADPSQQEAVRQVDKERVEAFNRNDVDRMASLFHPDARIHFAPTGQTYDRDEFREWVERFLKNFDVKVQIDSIEIKDAKGNEVTVTATFTMHVTHNGKTITVHATYTIRYRLKDGQWKIIEVRIHRDEQKD

SEQ ID NO: 1570 - protein, 128 aa, synthetic construct
MSEKELQEALKEWVEREIEAFNKGDMEKWKELFHPGSTFQNESTQQTYDREEVIKMIEELLSNGVKIQLDRLEVQFDHSNHITVRVEVQVHQHHGDQTHTMNVERHDHFRLKDGQFRLVRRQVRIDNT

SEQ ID NO: 1571 - protein, 128 aa, synthetic construct
MSEEEMKEAVKDWVRRYFEAINNNDLDALRRLYTPGATMHIARESQTYDYEQIVKWYEEMLRSDLKMEVKSLEIQIDHTNEATVTVHFTVHENHGDQTHTFRAEAHFRFRFENGQLKLLEVHFHFDQT

SEQ ID NO: 1572 - protein, 128 aa, synthetic construct
MSEEELREAIKDWFRRYVEAFNKNDLDALDSLYHPGVTMHIKENNKDYNKDQIREWYERLLSQDTKMQLDRLDIQIDHTNEVHVRVEMTFHTNRGDQTHTVHVQAHFRFRFENGSLKLVEVHFQFDHS

SEQ ID NO: 1573 - protein, 127 aa, synthetic construct
PGEEEAEKQIRELVRRFFEAIDKGDLDQLLEMLDDDFRFHDASKGETYDKEEFAEWAERLASQDSKHDIHELHIEFNGDTITVRVHWTLHLTHGDQQYTFHGTTELHFERNNGTLYLKEMRVEIHGE

SEQ ID NO: 1574 - protein, 127 aa, synthetic construct
PGEEEAERAIREWVRRFVEAINKGDMDTVDELFTPDWRFHHRSTQTTYDKEEFREWVEKLFRNDTKIEIKSLEIEIRGHTITVHVTITVHTNRGDQTYTFEVHETHHFERREGEFKLVRTEAETHGE

SEQ ID NO: 1575 - protein, 127 aa, synthetic construct
PGEEENTEVIKELLKRFYEAIDKGDWQAIHDLYHPDARLHNRSHNQTYNREQIVRMAEKQASQDTRRQIDEMHIEVRGNTITVHVHVTVHVNRGDRTETYTFTQTFHFEYSNGEFKLIEDHVQTHTN

SEQ ID NO: 1576 - protein, 127 aa, synthetic construct
PGEETQKEQVKEWLTQYFDLINKGDADAVASLYHPDARVHNSSHNQTYTYEELKEWYERLASADFQIQVDSIEIEINGDTVTVHVHYTMHVNRGDKTYTFHGTTTFHFENQDGSMYLVEVHTTTHSS

SEQ ID NO: 1577 - protein, 126 aa, synthetic construct
PEDEEAIKEIKRQLIEALDKGDMETLRQLFHPDVTFHHKDQTWNLNIEEWLERVARTLSNVEVHRHMKSIHIQPTTETTWTAEVHLEVHETHNGQKHTFRVTQHDRYVKLGDEWKILESESHRDST

SEQ ID NO: 1578 - protein, 128 aa, synthetic construct
VDESEQREAIKEWLQRYYEALNNKDWEAVASLYTPDSQYYQPNGQQYDREQFIDMIRKMLSRNDVQFHVKQIDIEVKPDGTVTVTVHVEVHETHNGQQYTFRITQEFRFRYEDSEFKLKEDHVRRDDG

SEQ ID NO: 1579 - protein, 129 aa, synthetic construct
PKEEEAKEAIKEWLKQFYEALQRHDVDAVASLYDKDSRFHDSRDPRTYDRDEFREWVERMLSSIDDFKVEIKEIRIQFNGEDRVTVEVHGHVTFNHGDSQRHATVTQTFVFNLKDWKLVEDHATFHDHT

SEQ ID NO: 1580 - protein, 126 aa, synthetic construct
PEKEIREQIKEIKERLVEALNKGDMDTFASLFHPDAQMHISRGRTFNSRDEIKKWFKDYKETFDVRIQITSIEIRISDSNQATVTVHITFHYNEDNKTVDYTFHDRYVIKDGDMRIVRSQIHSHER

SEQ ID NO: 1581 - protein, 128 aa, synthetic construct
PEEDEMREQIKEFVKREFEAINKGDLKTWEELVHPDATFHNSSEGRTYDVEEMKERIKKFVEVPTQIEVKSIEIQINKNGEATVTVHVQVHEHHGDQTHTFNITQHDHLRRINGQWYFIERHVTTDST

SEQ ID NO: 1582 - protein, 125 aa, synthetic construct
PSEEDEKEIRETKRQYVEAWNNNDLDKLADIVHPDAKYASRNLDYEEYIEWVKRWMERFKNVQIQIHSIHIQQDGSDNITVTVHFTVTEHHNGQQQHHRYTAHDHYRKSNGKWFIVRMETRRHGS

SEQ ID NO: 1583 - protein, 125 aa, synthetic construct
PSEEDERAVRDVVRRFYEAINHNDLDKLLELMHPDATFRARNLNYEQIKEWFREWMERFKNARLEIKSIEVRQHGSDTFTVTVHVTMHVTHNGQDQTYHITHHWVLVKFNGEWKIVSVEERTNGG

SEQ ID NO: 1584 - protein, 125 aa, synthetic construct
ADKEQQEDIRRIIQRLVEAWNNNDLDTWLSLFDKDWRYSSRNIDKEEFREWMERVIRTFQDLKVQLDSIRIELDGSDTITVHVHITFHHYHNGQQHTHHVTETHHFVRKEGRWYIVRTTTRRTDG

SEQ ID NO: 1585 - protein, 122 aa, synthetic construct
PDEEEQEKVKKFIQRYVEAFNNNDLEELESLYHPGAQLDINGVDLKQFKEIVERLIRNGFEFRLEIKSIEIRKDGDEITAHVHVQVHTTHNGKTDTVDVTQTFHFDTRHDQLKNHQVHHQGS

SEQ ID NO: 1586 - protein, 123 aa, synthetic construct
SNKETEELVRELIKQWFEAVDTDPDKAASYYDEDAQVHSSTGETLHDLQSIKDYIRNHSKDYQHELKSIEIRIHPDGTVTVHVTFQVHDRTTGQTYTVHTTFFIVQKGDTVYIKEQRTTIHTG

SEQ ID NO: 1587 - protein, 118 aa, synthetic construct
LSEEEIKEWLKRFYEAVDRGDRDKIRKLLHPDVQMHSASGRTFNNIDEIIKWLSEFTSRGFKRHIREIHIEITKDEVHVTVHAEIHFEKTKQTIKFTHHWTFDLRHKKIVSVQFHETG

SEQ ID NO: 1588 - protein, 118 aa, synthetic construct
PSDEELKEWKERFIEAINKGDLDKLRELLHPDVTFHIWNGRTFNNLDEVLKWFEEFTSQNWHMEIKDMRIEHKDNEIRVTVHITVHNDSTGQTFHFTFHDRYDKRHKKLTESRIQETQ

SEQ ID NO: 1589 - protein, 118 aa, synthetic construct
LSKEEARELVERFFEAFNRGDMDAIREIVHPDAQFHDSNGEQLTNIEEIVEWAKKLFDQGVEIQITEIHVEVTETHVHVTVHWNGTDRRTGRTFRGTTHFVFDKRTKKIVRLEFRHTG

SEQ ID NO: 1590 - protein, 124 aa, synthetic construct
DTPEDEEAIKELVKREVEAFNKGDMDALASFYDDDAQMHLSNGQTFDTKEEIKKWLEELSKNSQIHVESLHIQKDDDNTFHVEVHAQMRNKTTGQDVTVTRHVTVKREDTGLKIKHDQVRIDSN

SEQ ID NO: 1591 - protein, 124 aa, synthetic construct
KDEELEKAAREVVRRLIEAINTGDLDTLKELYAPDAQFHVWEGRTFDTLEEIAKWFKEFAEKFDLEIKSIEIRIDDDDRVTVHVHVKVTNRETKQDFTFRSTMHLKFDHGGVKIKREQVDVDPN

SEQ ID NO: 1592 - protein, 124 aa, synthetic construct
DKEEDETDIKEILKRLFRAMDEGDMDTMKSLFDEDWQYHNTSGRTFTTLEEFAEWISQFSSDTAHHIKSIEIRKDDNNQLEVHVHVEVHRSSTGQTFRYTETHRFEKKDGSWKIVETRQHVDPS

SEQ ID NO: 1593 - protein, 124 aa, synthetic construct
DDEEMEEEVRQLVRRLAEALNKGDRDAIRELYHPDARMELWNGRQFDTLDEIVEWFMKWASHFDIEIKSIEVRVDDNQTVTVHVHFEATDRRTGKTVTFTSTIHFVKNDTGMKIKEEQIHADSN

SEQ ID NO: 1594 - protein, 120 aa, synthetic construct
PETEEQVKDWKKKFVEAVNNGDMDKLRELFHPDARMHLSNGRTFTTLDEILEWFKKWASTYTIHIHSLEIRENDDGSVTVHVHGTVHNRRTGKQVQVTATDHYDRSRNKLIRSQFNFDPQ

SEQ ID NO: 1595 - protein, 120 aa, synthetic construct
PDLQEEIRELVKRFYAAMNTGDADTLRDLFHPDATMHLSNGQTFTTLDEILEWLIKFASHFDFQITSIHIQVNHDGTITVTVHVTVRDRRTGQEYRVTDHYHVDSRHGKIIEVRSHVDST

SEQ ID NO: 1596 - protein, 120 aa, synthetic construct
PDFQEEAKEIVRRLAEAFNKNDRDKLKDLFHPDAKMHVYNGQTFETRDEIVEWFSRLASHAQIHIHSIETHLHDDGSVTTHVHWTMTDKRTGQNFTGTTTFHVDRRTGKITEVRIHIDSN

SEQ ID NO: 1597 - protein, 123 aa, synthetic construct
SDESEIEEAIRQIVRRLVEAFNKNDMDKLAEIYDKDATFHINGQTFSDLEEFLEWVKQVVSRGVQVTFTVEIHINGDTVTVHVRATFHFESHNQTFTGHSTIHIRLEGDQWKIVEEHLQIDQN

SEQ ID NO: 1598 - protein, 123 aa, synthetic construct
SDRKEFEEEIREIIRRMFEAFNKGDRDTLRELYDKDATIHINGQTFTSWEEFLKWVTDVNSRGVRVEFRVHVEVHGDTVTVRVEAHLHQESTGETYTVRSTIHFRLENNRLKIVEEHVQVDKQ

SEQ ID NO: 1599 - protein, 123 aa, synthetic construct
ADESEWQEQVKQWVERFVEAFNKNDRDALRELYDDDSTVHINGQTFTDWQEILEYISQLASTNAQVTFTIEIHVSGNTVTVHVTLTVTQENTGRTFTVHSTFHFELQDSQLRLVEEHVQTDQN

SEQ ID NO: 1600 - protein, 123 aa, synthetic construct
NDESEFRQVIKEWVERFFEAFNKNDRDELRKLLDDDATFHINGQTYSTIEEFLEWIERVWSRGVQVTFTIEVHVDGDEATVRVEWTAHFKSTGETYHGTTTFHFRVEGRQFKIVEVRIQMDKS

SEQ ID NO: 1601 - protein, 123 aa, synthetic construct
TSEDEFKEQVKEVLNQFYEAINRGDRDTLRELFSKGGTVHFQNGRTFTDQEEVVDWFSKFASSGFRIEWHIEIKEITEEHVTVTVHIRITDQNNNTQNVTDHYFMRLENGTWKITEVRSQYDN

SEQ ID NO: 1602 - protein, 123 aa, synthetic construct
MSEKEIREAIKEFLERFYELLDRGDLDAIASMYADGATMHLENGQTFNSKEEIKQWFEKQISSDMRREVEVHIREISETTATVTAHVTLHGKDGTTIHITQEMHIEFQNGSIKIKEDRITTDS

SEQ ID NO: 1603 - protein, 121 aa, synthetic construct
PSPEDQEKIRQIIRRYYEAFNKGDADKMAELFHDDWTFHHANGQTFTTKDEFREWATRLLSQNLTIEVEVHIHSGSKDEVTVTVHFHVRQKDTTFTEHHRFRKDKDGRLFIVETRVRQDGS

SEQ ID NO: 1604 - protein, 121 aa, synthetic construct
MSKEQEDQIREWFERYYEAINKKDLETIVRLVHDDVTFHHDNGRTFTTKEEFKEWVKQILDQDWTLRFSIRIDSGSEKEVTVTVHVTYEQEPRTVREEHHFRFNDDGSLRVVETRFDSHGG

SEQ ID NO: 1605 - protein, 121 aa, synthetic construct
PDPHVLEAIKDFVRRYAEAFNKKDLDTLVSLFHEDWTYHHSNGQTFTTRDEYREWVKRLLEQDWTIDVEVHFTSGSEKEYTVEVHFTFRQQPMTVTEHHRFRRHDNGQVRIVETRARWHGG

SEQ ID NO: 1606 - protein, 121 aa, synthetic construct
PSKEQEEKVREWLERFYEAFNKKDLDTMASLVHDDVTLHLSNGQTFTTKDEIIKFLKELLSQDLTLEFEIHIDSGTEEEITVTVHVTIKQIDQTVTHHWFFRFDKDGNIYLVEVRENLTGK

SEQ ID NO: 1607 - protein, 121 aa, synthetic construct
PSEEQEKAAREVIRRFYDAFNKGDIDKIAELIHDDATLHIWNGQTFTTKEEVIEFIQRLLSQNIQIDFEIHVKGGSKDEVTVEVEVHYRQSDMTVTHHWFLRRLPDGSWKVVELRARSDGK

SEQ ID NO: 1608 - protein, 116 aa, synthetic construct
MSEEEIRQLKRRLAEAFNKKDADAIAELFHPDSRVTFASDNRTFTDKDEIKEWFTQYASRDIQVEIKSIEIRGKTVTVHMTFHNKRTGTTTHATFHDHYDDNGRLASSEIHFNTQN

SEQ ID NO: 1609 - protein, 116 aa, synthetic construct
PSEEEIREWARRYYEALNNNDADTAVSLMDDDWTVHFSEGRTFHSKEEFKKWVEEMLSTDVKIEIKDLHIEGDTVTVHGTVTRTHNGQTRDLRTTDHHTFDKNGRITETHFHHDQQ

SEQ ID NO: 1610 - protein, 118 aa, synthetic construct
PISEEQIKEFIKRFFEALNKGDVDLLAELVHDDATFTHNNQTFRMSKEEFREWVKKWLSSDTQIEIKSIEIRGDTVTVHWTAHTNKGDRTQTVHGTTHFEFDHDGKLVRVQTHNNPTS

SEQ ID NO: 1611 - protein, 118 aa, synthetic construct
PVSEEQIKEFKKREVDAFNTGDMDKLADLYHDDATLTHGDQTFPMSKEEIKKWFEELFRNDTKFEIKSIEIRGDTVTVHVTLHTNHGDQTTTIHYTYHDRYQPDGKLTESRESEHPTS

SEQ ID NO: 1612 - protein, 118 aa, synthetic construct
PMSEEQIEELVRRFYEAFNNGDLDKLREIMHDDATWTNGDQTFPMSKDELIEMFQKMLSTDTKLEIKSIEVRGDTVTVHVTVHTNHGDRTHTFHVTHHWTFNKDGKIVEVRQHMQPTR

SEQ ID NO: 1613 - protein, 118 aa, synthetic construct
STSQEQNKEIDTRRVEAFNKGDWEKLSDLFHDDATFTHNNQTQPRSKEEFIRWVKKVHSNDTKFEIERMEAHGDTVHVEVTVHHTHGDKTTTVKVRYTVRYHSNGKILEYHEHRHPTS

SEQ ID NO: 1614 - protein, 118 aa, synthetic construct
PISQEQIKEFLRQFYEALDKGDLDKLRELVHDDWTYVNNDQRYHMSKEEFKEWVKKFASSDTKREIKSMEIRGDTVTVHVTLHTNHGSETKTIQYTEHHRFDHDGKLVETQQHEQPTS

SEQ ID NO: 1615 - protein, 124 aa, synthetic construct
PASEEEIREWLKQFYEAFNNKDWKKLADLMAPDARMEVTQSNGQNYEFTTKEEIIRWFQQLMSQFDSIEIKEIRIDQDRQTVTSHVTVHFTHNGQRFTVRVTEHHHFDHDGKARETKTTFDHGG
